(19) United States
(12) Patent Application Publication
(10) Pub. No.: US 2023/0374114 A1
(43) Pub. Date: Nov. 23, 2023

(54) CORONAVIRUS ANTIBODIES AND METHODS OF USE THEREOF

(71) Applicant: Dana-Farber Cancer Institute, Inc., Boston, MA (US)

(72) Inventors: Wayne A. Marasco, Wellsley, MA (US); Matthew Chang, Brookline, MA (US)

(21) Appl. No.: 17/919,486

(22) PCT Filed: Apr. 16, 2021
(86) PCT No.: PCT/US2021/027757

§ 371 Date: Oct. 17, 2022

Related U.S. Application Data
(60) Provisional application No. 63/011,063, filed on Apr. 16, 2020.
(60) Provisional application No. 63/016,154, filed on Apr. 27, 2020.
(60) Provisional application No. 63/021,672, filed on May 7, 2020.

(51) Int. Cl. C07K 16/10; A61P 31/14

(52) U.S. Cl. CPC C07K 16/1002; A61P 31/14; C07K 2317/565; C07K 2317/622

(57) ABSTRACT

The present invention provides monoclonal antibodies that neutralize SARS-CoV2 and methods of use thereof. The antibodies described herein can be used to treat SARS-CoV2 infections and symptoms thereof.

[0001] This application is an International Application which claims priority from U.S. Provisional Patent Application Nos. 63/011,063 filed on Apr. 16, 2020, 63/016,154 filed on Apr. 27, 2020, and 63/021,672 filed on May 7, 2020, the contents of which is incorporated herein by reference in its entirety.

[0002] All patents, patent applications and publications cited herein are hereby incorporated by reference in their entirety. The disclosures of these publications in their entireties are hereby incorporated by reference into this application in order to more fully describe the state of the art as known to those skilled therein as of the date of the invention described and claimed herein.

[0003] This patent disclosure contains material that is subject to copyright protection. The copyright owner has no objection to the facsimile reproduction by anyone of the patent document or the patent disclosure as it appears in the U.S. Patent and Trademark Office patent file or records, but otherwise reserves any and all copyright rights.

### SEQUENCE LISTING

[0004] The instant application contains a Sequence Listing which has been submitted electronically in ASCII format and is hereby incorporated by reference in its entirety. Said ASCII copy, created on Jun. 7, 2021, is named 5031461-102WO1_SL.txt and is 1,255,191 bytes in size.

### FIELD OF THE INVENTION

[0005] This invention relates generally to severe acute respiratory syndrome-associated coronavirus 2 (SARS-CoV2) neutralizing antibodies as well as to methods for use thereof.

### BACKGROUND

[0006] Human monoclonal antibody (mAb) therapy offers considerable advantages for prophylaxis, preemptive and acute treatment in viral outbreak settings.

### SUMMARY

[0007] An aspect of the invention is directed to isolated monoclonal antibodies directed to Severe Acute Respiratory Syndrome coronavirus (SARS-CoV2). In some embodiments, the antibody binds to an epitope in SEQ ID NO: 979. In some embodiments, the antibody binds to an epitope in the receptor binding domain (RBD) of the spike protein (S). In some embodiments, the antibody neutralizes SARS-CoV2. In some embodiments the epitope is linear. In other embodiments, the epitope is non-linear. In some embodiments, the epitope comprises a region within amino acids 319-490 of SEQ ID NO: 980 of the spike protein. In other embodiments, the epitope comprises a region within amino acids 319-541 SEQ ID NO: 980 of the spike protein. In further embodiments, the monoclonal antibody inhibits viral and cell membrane fusion. In yet other embodiments, the monoclonal antibody competes with the binding of a monoclonal antibody to the spike protein. In some embodiments, the monoclonal antibody blocks the binding of SARS-CoV2 spike protein to angiotensin converting enzyme 2 (ACE2) cell surface receptor. In another embodiment, the monoclonal antibody is a fully human antibody. In some embodiments, the monoclonal antibody comprises: (a) a heavy chain with three CDRs comprising the amino acid sequences GGSIRTHS (SEQ ID NO:93), IHHSGAT (SEQ ID NO:94), and ARGPGILSY (SEQ ID NO:95) respectively, and/or a light chain with three CDRs comprising the amino acid sequences SSNIGSNT (SEQ ID NO:227), SNN (SEQ ID NO:228), and AAWDDSLNVHYV (SEQ ID NO:229) respectively; (b) a heavy chain with three CDRs comprising the amino acid sequences GGSISSYY (SEQ ID NO:96), IYTSGST (SEQ ID NO:97), and ARDVGFGWFDR (SEQ ID NO:98) respectively and/or a light chain with three CDRs comprising the amino acid sequences SGSIASNY (SEQ ID NO:230), EDN (SEQ ID NO:231), and QSFDSASLWV (SEQ ID NO:232) respectively; (c) a heavy chain with three CDRs comprising the amino acid sequences GGSIRTHS (SEQ ID NO:99), IHHSGAT (SEQ ID NO:100), and ARGPGILSY (SEQ ID NO:101) respectively and/or a light chain with three CDRs comprising the amino acid sequences SSNIGSND (SEQ ID NO:233), SNN (SEQ ID NO:234), and ATWDDSLSAGV (SEQ ID NO:235) respectively; (d) a heavy chain with three CDRs comprising the amino acid sequences GDSVSSYSDA (SEQ ID NO:102), TYYRSKWYN (SEQ ID NO:103), and AREIVATTPFRNYYYGMDV (SEQ ID NO:104) respectively and/or a light chain with three CDRs comprising the amino acid sequences SGSIASNY (SEQ ID NO:236), QDK (SEQ ID NO:237), and QSYDSSSLWV (SEQ ID NO:238) respectively; (e) a heavy chain with three CDRs comprising the amino acid sequences GFTFSHYD (SEQ ID NO:105), IGYDGTNL (SEQ ID NO: 106), and ARAANYYDSSGYGRADAFDI (SEQ ID NO:107) respectively and/or a light chain with three CDRs comprising the amino acid sequences TGSIAGNY (SEQ ID NO:239), DDN (SEQ ID NO:240), and QSYDSGNRGV (SEQ ID NO:241) respectively; (f) a heavy chain with three CDRs comprising the amino acid sequences GFTFSDFP (SEQ ID NO:108), ISYDGNIK (SEQ ID NO:109), and AARGGSSFDI (SEQ ID NO:2780) respectively and/or a light chain with three CDRs comprising the amino acid sequences TSNIGNNA (SEQ ID NO:242), YNE (SEQ ID NO:243), and AAWDDSLSGHVV (SEQ ID NO:244) respectively; (g) a heavy chain with three CDRs comprising the amino acid sequences GFSLSTTGVG (SEQ ID NO:111), IYWNDDK (SEQ ID NO:112), and ARISGSGYFYPFDI (SEQ ID NO:113) respectively and/or a light chain with three CDRs comprising the amino acid sequences SGSIASNY (SEQ ID NO:245), EDN (SEQ ID NO:246), and QSYDSSSLWV (SEQ ID NO:247) respectively; (h) a heavy chain with three CDRs comprising the amino acid sequences GYTFSDYY (SEQ ID NO: 120), IDPNSGGT (SEQ ID NO:121), and ARDRGRGGQAGAFDY (SEQ ID NO:978) respectively and/or a light chain with three CDRs comprising the amino acid sequences KIGSKS (SEQ ID NO:254), DDS (SEQ ID NO:255), and HVWDSSSDQNV (SEQ ID NO:256) respectively; (i) a heavy chain with three CDRs comprising the amino acid sequences GFTFSSYA (SEQ ID NO:122), ISYGGSNK (SEQ ID NO:123), and AKVRGSGWYWGSAFDI (SEQ ID NO:124) respectively and/or a light chain with three CDRs comprising the amino acid sequences SLRAYF (SEQ ID NO:257), GQD (SEQ ID NO:258), and NSRDSGENHLI (SEQ ID NO:259) respectively; (j) a heavy chain with three CDRs comprising the amino acid sequences GYSFTGSH (SEQ ID NO:125), INPDSGVI (SEQ ID NO:126), and ARDKAIGYVWALDY (SEQ ID NO:127) respectively and/or a light chain with three CDRs comprising the amino acid sequences SSDVGTYNR (SEQ ID NO:260), EVS (SEQ ID NO:261), and SSYTRTFTYV (SEQ ID NO:262) respectively; (k) a heavy chain with three CDRs comprising the amino acid sequences GVSLDTIGMR (SEQ ID NO:128), IDWDDDK (SEQ ID NO: 129), and ARSGLLYDLDV (SEQ ID NO:130) respectively and/or a light chain with three CDRs comprising the amino acid sequences DSDIGANF (SEQ ID NO:263), RNT (SEQ ID NO:264), and QSYDSSLSAYV (SEQ ID NO:265) respectively; (1) a heavy chain with three CDRs comprising the amino acid sequences GYSFTSYW (SEQ ID NO:134), IYPGDSDT (SEQ ID NO:135), and ARGWQWHDY (SEQ ID NO:136) respectively and/or a light chain with three CDRs comprising the amino acid sequences SLRSYY (SEQ ID NO:269), DKD (SEQ ID NO:270), and NSRDRSDNHVV (SEQ ID NO:271) respectively; (m) a heavy chain with three CDRs comprising the amino acid sequences GDSVSSRSSA (SEQ ID NO:137), TYYRSNWNY (SEQ ID NO:138), and VRNMRPDFDL (SEQ ID NO:139) respectively and/or a light chain with three CDRs comprising the amino acid sequences QSVSNN (SEQ ID NO:272), DAT (SEQ ID NO:273), and QQYDNLPV (SEQ ID NO:274) respectively; (n) a heavy chain with three CDRs comprising the amino acid sequences GYTFTTSG (SEQ ID NO:140), ISAYNGNT (SEQ ID NO:141), and ARDFHLYYGMDV (SEQ ID NO:142) respectively and/or a light chain with three CDRs comprising the amino acid sequences SSDVGAYNY (SEQ ID NO:275), DVT (SEQ ID NO:276), and AVWDDGLNGRVV (SEQ ID NO:277) respectively; (o) a heavy chain with three CDRs comprising the amino acid sequences GGTFSSYA (SEQ ID NO:143), INPNSGGT (SEQ ID NO:144), and ARGSGGYYLG (SEQ ID NO:145) respectively and/or a light chain with three CDRs comprising the amino acid sequences SNNVGNQG (SEQ ID NO:278), MNN (SEQ ID NO:279), and SAWDSSLSRWV (SEQ ID NO:280) respectively; (p) a heavy chain with three CDRs comprising the amino acid sequences GGTFSSYT (SEQ ID NO: 146), IIPILGTP (SEQ ID NO: 147), and AVGSGWYSGFDY (SEQ ID NO:148) respectively and/or a light chain with three CDRs comprising the amino acid sequences SGSIASNY (SEQ ID NO:281), EDS (SEQ ID NO:282), and QSFHNSNPVI (SEQ ID NO:283) respectively; (q) a heavy chain with three CDRs comprising the amino acid sequences GFTFSSYW (SEQ ID NO:149), IKQDGSEK (SEQ ID NO:150), and ARGFYYYGAFDI (SEQ ID NO:151) respectively and/or a light chain with three CDRs comprising the amino acid sequences SGSIASNY (SEQ ID NO:284), EDN (SEQ ID NO:285), and QSYDSSNHWV (SEQ ID NO:286) respectively; (r) a heavy chain with three CDRs comprising the amino acid sequences GFTFDDYA (SEQ ID NO:152), IDWNSGVI (SEQ ID NO:153), and AKDAYSYGFLGAFDI (SEQ ID NO:154) respectively and/or a light chain with three CDRs comprising the amino acid sequences NIGSKS (SEQ ID NO:287), EDR (SEQ ID NO:288), and QVWDGDSDHYV (SEQ ID NO:289) respectively; (s) a heavy chain with three CDRs comprising the amino acid sequences GFTFDDYA (SEQ ID NO:155), IDWNSGVI (SEQ ID NO:156), and ARDILPSNFDGKKIIVFQPPAKRDLDNYYGMDV (SEQ ID NO:157) respectively and/or a light chain with three CDRs comprising the amino acid sequences SSDVGGYNL (SEQ ID NO:290), EGS (SEQ ID NO:291), and SSYTITDVVV (SEQ ID NO:292) respectively; or (t) a heavy chain with three CDRs comprising the amino acid sequences GYSFTSNW (SEQ ID NO:158), IFPGDSDT (SEQ ID NO:159), and ARESYNAYGS (SEQ ID NO:160) respectively and/or a light chain with three CDRs comprising the amino acid sequences SSNIGSNP (SEQ ID NO:293), SNN (SEQ ID NO:294), and AAWDDSLSGVV (SEQ ID NO:295) respectively.

[0008] In other embodiments, the monoclonal antibody comprises: (a) a heavy chain with three CDRs comprising the amino acid sequences GFTFTTYG (SEQ ID NO:114), ISYDGSIK (SEQ ID NO:115), and ARVGDSSSYYGIDA (SEQ ID NO:116) respectively, and/or a light chain with three CDRs comprising the amino acid sequences SSNIGSNS (SEQ ID NO:248), SNN (SEQ ID NO:249), and AAWDDSLTGYV (SEQ ID NO:250) respectively; (b) a heavy chain with three CDRs comprising the amino acid sequences GFTFSSHA (SEQ ID NO:117), ISYDGSYT (SEQ ID NO:118), and ARDWVNFGMDV (SEQ ID NO:119) respectively, and/or a light chain with three CDRs comprising the amino acid sequences SSDVGGYNY (SEQ ID NO:251), EVS (SEQ ID NO:252), and AAWDDSLSGPV (SEQ ID NO:253) respectively; or (c) a heavy chain with three CDRs comprising the amino acid sequences GFTFSDYP (SEQ ID NO:131), TSYDGRIK (SEQ ID NO:132), and ARDPGWLRSVGMDV (SEQ ID NO:133) respectively, and/or a light chain with three CDRs comprising the amino acid sequences SGSIARNY (SEQ ID NO:266), ADR (SEQ ID NO:267), and QSYDSSNQAAV (SEQ ID NO:268) respectively. In yet further embodiments, the monoclonal antibody comprises:
[0009] a) a heavy chain with three CDRs comprising the amino acid sequences GYTFTSYG (SEQ ID NO:161), ISAYNGNT (SEQ ID NO:162), and ARGFPQLGSDY (SEQ ID NO: 163) respectively, and/or a light chain with three CDRs comprising the amino acid sequences SGSIASNY (SEQ ID NO:296), EDN (SEQ ID NO:297), and QAWDSNSYV (SEQ ID NO:2781) respectively;
[0010] b) a heavy chain with three CDRs comprising the amino acid sequences GGTFSSYA (SEQ ID NO:164), ISGYNGNT (SEQ ID NO:165), and ARQMKDSGNYWEYYYYGMDV (SEQ ID NO:166) respectively, and/or a light chain with three CDRs comprising the amino acid sequences NIGSES (SEQ ID NO:299), EDR (SEQ ID NO:300), and QVWNPSGSLQYV (SEQ ID NO:301) respectively;
[0011] c) a heavy chain with three CDRs comprising the amino acid sequences GYTFTSYG (SEQ ID NO:167), ISTYNGNT (SEQ ID NO:168), and ARDVFGHFDY (SEQ ID NO:169) respectively, and/or a light chain with three CDRs comprising the amino acid sequences SGNIATNY (SEQ ID NO:302), EDN (SEQ ID NO:303), and KSYDDGNHV (SEQ ID NO:304) respectively;
[0012] d) a heavy chain with three CDRs comprising the amino acid sequences GFSLTTTGVS (SEQ ID NO:170), IHWDDDK (SEQ ID NO:171), and ASFIMTVYAEYFED (SEQ ID NO: 172) respectively, and/or a light chain with three CDRs comprising the amino acid sequences QSVSSN (SEQ ID NO:305), DVS (SEQ ID NO:306), and QQRGVWPLT (SEQ ID NO:307) respectively;
[0013] e) a heavy chain with three CDRs comprising the amino acid sequences GFSLSTSAMC (SEQ ID NO:173), IDWDNDR (SEQ ID NO:174), and AHSPYDSIWGSFRPSVYYFDY (SEQ ID NO:175) respectively, and/or a light chain with three CDRs comprising the amino acid sequences SGSIVSSY (SEQ ID NO:308), EHN (SEQ ID NO:309), and QSYDSQNGV (SEQ ID NO:310) respectively;
[0014] f) a heavy chain with three CDRs comprising the amino acid sequences GFTFSDYY (SEQ ID NO:176), ISSSSSDT (SEQ ID NO:177), and AMPTREPAY (SEQ ID NO:178) respectively, and/or a light chain with three CDRs comprising the amino acid sequences SSDLGTYNY (SEQ ID NO:311), DVF (SEQ ID NO:312), and SSYTSSSTYV (SEQ ID NO:313) respectively;
[0015] g) a heavy chain with three CDRs comprising the amino acid sequences GFAFSDFP (SEQ ID NO: 179), ISYDGSLK (SEQ ID NO:180), and AREGVSNSRPFDH (SEQ ID NO:181) respectively, and/or a light chain with three CDRs comprising the amino acid sequences SIGTKS (SEQ ID NO: 314), DDS (SEQ ID NO: 2782), and QVWESDDDDLV (SEQ ID NO:316) respectively;
[0016] h) a heavy chain with three CDRs comprising the amino acid sequences GFTFSSYA (SEQ ID NO:182), ISSNGGST (SEQ ID NO:183), and TRDLWSGSADSFDI (SEQ ID NO:184) respectively, and/or a light chain with three CDRs comprising the amino acid sequences SLRRYY (SEQ ID NO:317), GKN (SEQ ID NO:318), and NSRDISDNQWQWI (SEQ ID NO:319) respectively;
[0017] i) a heavy chain with three CDRs comprising the amino acid sequences GFPFNAYY (SEQ ID NO:185), INQDGSEK (SEQ ID NO:186), and ARLYWWGMDV (SEQ ID NO:187) respectively, and/or a light chain with three CDRs comprising the amino acid sequences SSDVGGYKY (SEQ ID NO:320), DVN (SEQ ID NO:321), and SSYTGRMNLYV (SEQ ID NO:322) respectively;
[0018] j) a heavy chain with three CDRs comprising the amino acid sequences GFTFDDYA (SEQ ID NO:188), IDWNSGVI (SEQ ID NO:189), and AKDAYSYGFLGAFDI (SEQ ID NO:190) respectively, and/or a light chain with three CDRs comprising the amino acid sequences NIRTKG (SEQ ID NO:323), YAS (SEQ ID NO:324), and QVWDSSSDLVV (SEQ ID NO:325) respectively;
[0019] k) a heavy chain with three CDRs comprising the amino acid sequences GFTFDDYA (SEQ ID NO:191), ISWNSGSI (SEQ ID NO:192), and ARDWWGSIDH (SEQ ID NO:193) respectively, and/or a light chain with three CDRs comprising the amino acid sequences SSDVGGYDY (SEQ ID NO:326), DVS (SEQ ID NO:327), and SSYTSSSPVV (SEQ ID NO:328) respectively;
[0020] l) a heavy chain with three CDRs comprising the amino acid sequences GGSISSSNW (SEQ ID NO:194), IYHSGST (SEQ ID NO:195), and ARRGGTYHRGAFDI (SEQ ID NO:196) respectively, and/or a light chain with three CDRs comprising the amino acid sequences SRDVGSYDL (SEQ ID NO:329), EGS (SEQ ID NO:330), and SSYTSSNSLV (SEQ ID NO:331) respectively;
[0021] m) a heavy chain with three CDRs comprising the amino acid sequences GASISNSF (SEQ ID NO:197), TSYSGNS (SEQ ID NO:198), and ARREWIKGHFDY (SEQ ID NO:199) respectively, and/or a light chain with three CDRs comprising the amino acid sequences GGSIASNY (SEQ ID NO:332), EDN (SEQ ID NO:333), and QSYDSSNPVV (SEQ ID NO:334) respectively;
[0022] n) a heavy chain with three CDRs comprising the amino acid sequences GGSFTTHS (SEQ ID NO:200), ILPGGAT (SEQ ID NO:201), and ARGPGILSY (SEQ ID NO:202) respectively, and/or a light chain with three CDRs comprising the amino acid sequences SSIGSND (SEQ ID NO:335), SNN (SEQ ID NO:336), and AWDDSLSAVV (SEQ ID NO:337) respectively;
[0023] o) a heavy chain with three CDRs comprising the amino acid sequences GGSFRTHS (SEQ ID NO:203), IHHSGAT (SEQ ID NO:204), and ARGPGILSY (SEQ ID NO:205) respectively, and/or a light chain with three CDRs comprising the amino acid sequences SSNIGSNT (SEQ ID NO:338), INN (SEQ ID NO:339), and AEWYDSLNVHYV (SEQ ID NO:340) respectively;
[0024] p) a heavy chain with three CDRs comprising the amino acid sequences GGSIRTHS (SEQ ID NO:206), IHHSGAT (SEQ ID NO:207), and ARGPGILSY (SEQ ID NO:208) respectively, and/or a light chain with three CDRs comprising the amino acid sequences SSNIGSNT (SEQ ID NO:341), INN (SEQ ID NO:342), and AECYDSLNDHYV (SEQ ID NO:343) respectively;
[0025] q) a heavy chain with three CDRs comprising the amino acid sequences GGSIRTHS (SEQ ID NO:209), IHHSGAT (SEQ ID NO:210), and GRGPGILSY (SEQ ID NO:211) respectively, and/or a light chain with three CDRs comprising the amino acid sequences SSNIGSNT (SEQ ID NO:344), SNN (SEQ ID NO:345), and AAWDDSLNVHYV (SEQ ID NO:346) respectively;
[0026] r) a heavy chain with three CDRs comprising the amino acid sequences GYSFTSYW (SEQ ID NO:212), IYPGDSDT (SEQ ID NO:213), and ARQGDGGGYDY (SEQ ID NO:214) respectively, and/or a light chain with three CDRs comprising the amino acid sequences SSNIGSNP (SEQ ID NO:347), NNN (SEQ ID NO:348), and AAWDDSLNGL (SEQ ID NO:349) respectively;
[0027] s) a heavy chain with three CDRs comprising the amino acid sequences RYSFSNYW (SEQ ID NO:215), IYPYDSDT (SEQ ID NO:216), and ARQGSSQSFDI (SEQ ID NO:217) respectively, and/or a light chain with three CDRs comprising the amino acid sequences SLRSYY (SEQ ID NO:350), QDS (SEQ ID NO: 2783), and QAWDSNSYV (SEQ ID NO: 2781) respectively;
[0028] t) a heavy chain with three CDRs comprising the amino acid sequences GYSFTSYW (SEQ ID NO:218), IYPGDSDT (SEQ ID NO:219), and ARRRGSAAAFDT (SEQ ID NO:220) respectively, and/or a light chain with three CDRs comprising the amino acid sequences SSNIGSNP (SEQ ID NO:353), DNN (SEQ ID NO:354), and EAWDDSLSGPV (SEQ ID NO:355) respectively;
[0029] u) a heavy chain with three CDRs comprising the amino acid sequences GYSFTSYW (SEQ ID NO:221), IYPGDSDT (SEQ ID NO:222), and ARTTYSYGSFDY (SEQ ID NO:223) respectively, and/or a light chain with three CDRs comprising the amino acid sequences SSNIGGNS (SEQ ID NO:356), RNN (SEQ ID NO:357), and AAWDDSLNGWV (SEQ ID NO:358) respectively; or
[0030] v) a heavy chain with three CDRs comprising the amino acid sequences GDSVTSNSAA (SEQ ID NO:224), TYYSSKWYN (SEQ ID NO:225), and ARGWLRLSFDP (SEQ ID NO:226) respectively, and/or a light chain with three CDRs comprising the amino acid sequences SGSIASNY (SEQ ID NO:359), EDN (SEQ ID NO:360), and QSYDPNNHGVV (SEQ ID NO:361) respectively.

[0031] In other embodiments, the monoclonal antibody comprises: a) a heavy chain with three CDRs comprising the amino acid sequences GFSLSTSGVG (SEQ ID NO:754), IYWDDDK (SEQ ID NO:755), and ARISGSGYFYPFDI (SEQ ID NO:756) respectively, and/or a light chain with three CDRs comprising the amino acid sequences SGSIASNY (SEQ ID NO:802), EDN (SEQ ID NO:803), and QSYDSSNLWV (SEQ ID NO:804) respectively; b) a heavy chain with three CDRs comprising the amino acid sequences GDSVSSNSAA (SEQ ID NO:757), TYYRSRWYN (SEQ ID NO:758), and AREIRGFDY (SEQ ID NO:759) respectively, and/or a light chain with three CDRs comprising the amino acid sequences SSDVGAYNF (SEQ ID NO:805), DFN (SEQ ID NO:806), and SSYAGSNNFDVV (SEQ ID NO:807) respectively; c) a heavy chain with three CDRs comprising the amino acid sequences GFTFGDYA (SEQ ID NO:760), IRSKAYGGTT (SEQ ID NO:761), and TTADDDMDV (SEQ ID NO:762) respectively, and/or a light chain with three CDRs comprising the amino acid sequences SGTIASNY (SEQ ID NO:808), EDN (SEQ ID NO:809), and QSYDTSNHYV (SEQ ID NO:810) respectively; d) a heavy chain with three CDRs comprising the amino acid sequences GFTFSNYG (SEQ ID NO:763), IWERGSKK (SEQ ID NO:764), and AREGISMTGAEYFQH (SEQ ID NO:765) respectively, and/or a light chain with three CDRs comprising the amino acid sequences SSNIGAGYD (SEQ ID NO:811), GTN (SEQ ID NO:812), and QSYDNSLTDPYV (SEQ ID NO:813) respectively; e) a heavy chain with three CDRs comprising the amino acid sequences GFTFDDYA (SEQ ID NO:766), IDWNSGVI (SEQ ID NO:767), and AKDIGPGGSGSYYAFDI (SEQ ID NO:768) respectively, and/or a light chain with three CDRs comprising the amino acid sequences SSDVGGSKY (SEQ ID NO:814), DVT (SEQ ID NO:815), and AAWDDSLNGVV (SEQ ID NO:816) respectively; f) a heavy chain with three CDRs comprising the amino acid sequences GFSFSRYG (SEQ ID NO:769), IRHDGSKK (SEQ ID NO:770), and AKDGRLEAALDD (SEQ ID NO:771) respectively, and/or a light chain with three CDRs comprising the amino acid sequences SGSIANNF (SEQ ID NO:817), EDN (SEQ ID NO:818), and QSYDSSNLV (SEQ ID NO:819) respectively; g) a heavy chain with three CDRs comprising the amino acid sequences GYSFTSYW (SEQ ID NO:772), IYPGDSDT (SEQ ID NO:773), and ARRGDLDAFDI (SEQ ID NO:774) respectively, and/or a light chain with three CDRs comprising the amino acid sequences SANIGSNA (SEQ ID NO:820), GNT (SEQ ID NO:821), and AAWDDSLNGYV (SEQ ID NO:822) respectively; h) a heavy chain with three CDRs comprising the amino acid sequences GYRLSDYY (SEQ ID NO:775), IKQDGSEK (SEQ ID NO:776), and ARVRGWSRGYFDY (SEQ ID NO:777) respectively, and/or a light chain with three CDRs comprising the amino acid sequences SGSIASNY (SEQ ID NO:823), EDN (SEQ ID NO:824), and QSYDSSNHWV (SEQ ID NO:825) respectively; i) a heavy chain with three CDRs comprising the amino acid sequences GFTFDDYA (SEQ ID NO:778), ISWNSGSI (SEQ ID NO:779), and ARDWWGSIDH (SEQ ID NO:780) respectively, and/or a light chain with three CDRs comprising the amino acid sequences SSDVGGYDY (SEQ ID NO:826), DVS (SEQ ID NO:827), and SSYTSSSPVV (SEQ ID NO:828) respectively; j) a heavy chain with three CDRs comprising the amino acid sequences GFTFSHYD (SEQ ID NO:781), IGYDGTNL (SEQ ID NO:782), and ARAANYYDSSGYGRADAF (SEQ ID NO:2784) respectively, and/or a light chain with three CDRs comprising the amino acid sequences TGSIAGNY (SEQ ID NO:829), DDN (SEQ ID NO:830), and QSYDSGNRGV (SEQ ID NO:831) respectively; k) a heavy chain with three CDRs comprising the amino acid sequences GGTFSTYG (SEQ ID NO:784), IIPSLGIP (SEQ ID NO:785), and ARENIDLATNDF (SEQ ID NO:786) respectively, and/or a light chain with three CDRs comprising the amino acid sequences SRDIGAYGY (SEQ ID NO:832), EVR (SEQ ID NO:833), and SSYTSSSTLDVV (SEQ ID NO:834) respectively; 1) a heavy chain with three CDRs comprising the amino acid sequences GGTFSSSG (SEQ ID NO:787), IIPMLGTP (SEQ ID NO:788), and ARDGGNYDY (SEQ ID NO:789) respectively, and/or a light chain with three CDRs comprising the amino acid sequences SSNIGRNA (SEQ ID NO:835), SNN (SEQ ID NO:836), and SAWDTSLSTWV (SEQ ID NO:837) respectively; m) a heavy chain with three CDRs comprising the amino acid sequences GFTFSSYW (SEQ ID NO:790), IKQDGSEK (SEQ ID NO:791), and ARGFYYYGAFDI (SEQ ID NO:792) respectively, and/or a light chain with three CDRs comprising the amino acid sequences SGSIASNY (SEQ ID NO:838), EDN (SEQ ID NO:839), and QSYDSSNHWV (SEQ ID NO:840) respectively; n) a heavy chain with three CDRs comprising the amino acid sequences GFTFDDYA (SEQ ID NO:793), IDWNSGVI (SEQ ID NO:794), and AKDAYSYGFLGAFDI (SEQ ID NO:795) respectively, and/or a light chain with three CDRs comprising the amino acid sequences NIRTKG (SEQ ID NO:841), YAS (SEQ ID NO:842), and QVWDSSSDLVV (SEQ ID NO:843) respectively; o) a heavy chain with three CDRs comprising the amino acid sequences GYSFTGSH (SEQ ID NO:796), INPDSGVI (SEQ ID NO:797), and ARDKAIGYVWALDY (SEQ ID NO:798) respectively, and/or a light chain with three CDRs comprising the amino acid sequences SSDVGTYNR (SEQ ID NO:844), EVS (SEQ ID NO:845), and SSYTRTFTYV (SEQ ID NO:846) respectively; or p) a heavy chain with three CDRs comprising the amino acid sequences GASISNSF (SEQ ID NO:799), TSYSGNS (SEQ ID NO:800), and ARREWIKGHFDY (SEQ ID NO:801) respectively, and/or a light chain with three CDRs comprising the amino acid sequences GGSIASNY (SEQ ID NO:847), EDN (SEQ ID NO:848), and QSYDSSNPVV (SEQ ID NO:849) respectively. In embodiments, the monoclonal antibody comprises a heavy chain with three CDRs comprising the amino acid sequences GFSLTTSGVS (SEQ ID NO:983), IHWDDDK (SEQ ID NO:984), and ASFIMTVYAEYFED (SEQ ID NO:985) respectively, and/or a light chain with three CDRs comprising the amino acid sequences QSVSSN (SEQ ID NO:986), DVS (SEQ ID NO:987), and QQRGAWPLT (SEQ ID NO:988) respectively.

[0032] In other embodiments, the monoclonal antibody comprises:
[0033] a. a V_{H} amino acid sequence having SEQ ID NO: 1, and a V_{L} amino acid sequence having SEQ ID NO: 2;
[0034] b. a V_{H} amino acid sequence having SEQ ID NO: 3, and a V_{L} amino acid sequence having SEQ ID NO: 4;
[0035] c. a V_{H} amino acid sequence having SEQ ID NO: 5, and a V_{L} amino acid sequence having SEQ ID NO: 6;
[0036] d. a V_{H} amino acid sequence having SEQ ID NO: 7, and a V_{L} amino acid sequence having SEQ ID NO: 8;
[0037] e. a V_{H} amino acid sequence having SEQ ID NO: 9, and a V_{L} amino acid sequence having SEQ ID NO: 10;
[0038] f. a V_{H} amino acid sequence having SEQ ID NO: 11, and a V_{L} amino acid sequence having SEQ ID NO: 12;
[0039] g. a V_{H} amino acid sequence having SEQ ID NO: 13, and a V_{L} amino acid sequence having SEQ ID NO: 14;
[0040] h. a V_{H} amino acid sequence having SEQ ID NO: 19, and a V_{L} amino acid sequence having SEQ ID NO: 20;
[0041] i. a V_{H} amino acid sequence having SEQ ID NO: 21, and a V_{L} amino acid sequence having SEQ ID NO: 22;
[0042] j. a V_{H} amino acid sequence having SEQ ID NO: 23, and a V_{L} amino acid sequence having SEQ ID NO: 24;
[0043] k. a V_{H} amino acid sequence having SEQ ID NO: 25, and a V_{L} amino acid sequence having SEQ ID NO: 26;
[0044] l. a V_{H} amino acid sequence having SEQ ID NO: 29, and a V_{L} amino acid sequence having SEQ ID NO: 30;
[0045] m. a V_{H} amino acid sequence having SEQ ID NO: 31, and a V_{L} amino acid sequence having SEQ ID NO: 32;
[0046] n. a V_{H} amino acid sequence having SEQ ID NO: 33, and a V_{L} amino acid sequence having SEQ ID NO: 34;
[0047] o. a V_{H} amino acid sequence having SEQ ID NO: 35, and a V_{L} amino acid sequence having SEQ ID NO: 36;
[0048] p. a V_{H} amino acid sequence having SEQ ID NO: 37, and a V_{L} amino acid sequence having SEQ ID NO: 38;
[0049] q. a V_{H} amino acid sequence having SEQ ID NO: 39, and a V_{L} amino acid sequence having SEQ ID NO: 40;
[0050] r. a V_{H} amino acid sequence having SEQ ID NO: 41, and a V_{L} amino acid sequence having SEQ ID NO: 42;
[0051] s. a V_{H} amino acid sequence having SEQ ID NO: 43, and a V_{L} amino acid sequence having SEQ ID NO: 44; or
[0052] t. a V_{H} amino acid sequence having SEQ ID NO: 47, and a V_{L} amino acid sequence having SEQ ID NO: 48.

[0053] In some embodiments, the antibody comprises: (a) a V_{H} amino acid sequence having SEQ ID NO: 15, and a V_{L} amino acid sequence having SEQ ID NO: 16; (b) a V_{H} amino acid sequence having SEQ ID NO: 17, and a V_{L} amino acid sequence having SEQ ID NO: 18; or (c) a V_{H} amino acid sequence having SEQ ID NO: 27, and a V_{L} amino acid sequence having SEQ ID NO: 28. In other embodiments, the monoclonal antibody comprises:
[0054] a. a V_{H} amino acid sequence having SEQ ID NO: 49, and a V_{L} amino acid sequence having SEQ ID NO: 50;
[0055] b. a V_{H} amino acid sequence having SEQ ID NO: 51, and a V_{L} amino acid sequence having SEQ ID NO: 52;
[0056] c. a V_{H} amino acid sequence having SEQ ID NO: 53, and a V_{L} amino acid sequence having SEQ ID NO: 54;
[0057] d. a V_{H} amino acid sequence having SEQ ID NO: 55, and a V_{L} amino acid sequence having SEQ ID NO: 56;
[0058] e. a V_{H} amino acid sequence having SEQ ID NO: 57, and a V_{L} amino acid sequence having SEQ ID NO: 58;
[0059] f. a V_{H} amino acid sequence having SEQ ID NO: 59, and a V_{L} amino acid sequence having SEQ ID NO: 60;
[0060] g. a V_{H} amino acid sequence having SEQ ID NO: 61, and a V_{L} amino acid sequence having SEQ ID NO: 62;
[0061] h. a V_{H} amino acid sequence having SEQ ID NO: 63, and a V_{L} amino acid sequence having SEQ ID NO: 64;
[0062] i. a V_{H} amino acid sequence having SEQ ID NO: 65, and a V_{L} amino acid sequence having SEQ ID NO: 66;
[0063] j. a V_{H} amino acid sequence having SEQ ID NO: 67, and a V_{L} amino acid sequence having SEQ ID NO: 68;
[0064] k. a V_{H} amino acid sequence having SEQ ID NO: 69, and a V_{L} amino acid sequence having SEQ ID NO: 70;
[0065] l. a V_{H} amino acid sequence having SEQ ID NO: 71, and a V_{L} amino acid sequence having SEQ ID NO: 72;
[0066] m. a V_{H} amino acid sequence having SEQ ID NO: 73, and a V_{L} amino acid sequence having SEQ ID NO: 74;
[0067] n. a V_{H} amino acid sequence having SEQ ID NO: 75, and a V_{L} amino acid sequence having SEQ ID NO: 76;
[0068] o. a V_{H} amino acid sequence having SEQ ID NO: 77, and a V_{L} amino acid sequence having SEQ ID NO: 78;
[0069] p. a V_{H} amino acid sequence having SEQ ID NO: 79, and a V_{L} amino acid sequence having SEQ ID NO: 80;
[0070] q. a V_{H} amino acid sequence having SEQ ID NO: 81, and a V_{L} amino acid sequence having SEQ ID NO: 82;
[0071] r. a V_{H} amino acid sequence having SEQ ID NO: 83, and a V_{L} amino acid sequence having SEQ ID NO: 84;
[0072] s. a V_{H} amino acid sequence having SEQ ID NO: 85, and a V_{L} amino acid sequence having SEQ ID NO: 86;
[0073] t. a V_{H} amino acid sequence having SEQ ID NO: 87, and a V_{L} amino acid sequence having SEQ ID NO: 88;
[0074] u. a V_{H} amino acid sequence having SEQ ID NO: 89, and a V_{L} amino acid sequence having SEQ ID NO: 90; or
[0075] v. a V_{H} amino acid sequence having SEQ ID NO: 91, and a V_{L} amino acid sequence having SEQ ID NO: 92.

[0076] In some embodiments, the antibody comprises: a) a VH amino acid sequence having SEQ ID NO: 722, and a VL amino acid sequence having SEQ ID NO: 723; b) a VH amino acid sequence having SEQ ID NO: 724, and a VL amino acid sequence having SEQ ID NO: 725; c) a VH amino acid sequence having SEQ ID NO: 726, and a VL amino acid sequence having SEQ ID NO: 727; d) a VH amino acid sequence having SEQ ID NO: 728, and a VL amino acid sequence having SEQ ID NO: 729; e) a VH amino acid sequence having SEQ ID NO: 730, and a VL amino acid sequence having SEQ ID NO: 731; f) a VH amino acid sequence having SEQ ID NO: 732, and a VL amino acid sequence having SEQ ID NO: 733; g) a VH amino acid sequence having SEQ ID NO: 734, and a VL amino acid sequence having SEQ ID NO: 735; h) a VH amino acid sequence having SEQ ID NO: 736, and a VL amino acid sequence having SEQ ID NO: 737; i) a VH amino acid sequence having SEQ ID NO: 738, and a VL amino acid sequence having SEQ ID NO: 739; j) a VH amino acid sequence having SEQ ID NO: 740, and a VL amino acid sequence having SEQ ID NO: 741; k) a VH amino acid sequence having SEQ ID NO: 742, and a VL amino acid sequence having SEQ ID NO: 743; 1) a VH amino acid sequence having SEQ ID NO: 744, and a VL amino acid sequence having SEQ ID NO: 745; m) a VH amino acid sequence having SEQ ID NO: 746, and a VL amino acid sequence having SEQ ID NO: 747; n) a VH amino acid sequence having SEQ ID NO: 748, and a VL amino acid sequence having SEQ ID NO: 749; o) a VH amino acid sequence having SEQ ID NO: 750, and a VL amino acid sequence having SEQ ID NO: 751; or p) a VH amino acid sequence having SEQ ID NO: 752, and a VL amino acid sequence having SEQ ID NO: 753. In embodiments, the monoclonal antibody comprises a VH amino acid sequence having SEQ ID NO: 981, and a VL amino acid sequence having SEQ ID NO: 982.

[0077] An aspect of the invention is directed to isolated scFv antibodies directed to Severe Acute Respiratory Syndrome coronavirus (SARS-CoV2). In some embodiments, the antibody binds to an epitope in SEQ ID NO: 979. In some embodiments, the scFv antibody binds to an epitope in the receptor binding domain (RBD) of the spike protein of SARS-CoV2. In other embodiments, the scFv antibody neutralizes SARS-CoV2. In some embodiments the epitope is linear. In other embodiments, the epitope is non-linear. In some embodiments, the epitope comprises a region within amino acids 319-490 of SEQ ID NO: 980 of the spike protein. In other embodiments, the epitope comprises a region within amino acids 319-541 SEQ ID NO: 980 of the spike protein. In further embodiments, the scFv antibody inhibits viral and cell membrane fusion. In yet other embodiments, the scFv antibody competes with the binding of a monoclonal antibody to the spike protein. In some embodiments, the scFv antibody blocks the binding of SARS-CoV2 spike protein to angiotensin converting enzyme 2 (ACE2) cell surface receptor. In another embodiment, the scFv antibody is a fully human antibody. In some embodiments, the scFv antibody comprises: (a) a heavy chain with three CDRs comprising the amino acid sequences GGSIRTHS (SEQ ID NO:93), IHHSGAT (SEQ ID NO:94), and ARGPGILSY (SEQ ID NO:95) respectively, and/or a light chain with three CDRs comprising the amino acid sequences SSNIGSNT (SEQ ID NO:227), SNN (SEQ ID NO:228), and AAWDDSLNVHYV (SEQ ID NO:229) respectively; (b) a heavy chain with three CDRs comprising the amino acid sequences GGSISSYY (SEQ ID NO:96), IYTSGST (SEQ ID NO:97), and ARDVGFGWFDR (SEQ ID NO:98) respectively and/or a light chain with three CDRs comprising the amino acid sequences SGSIASNY (SEQ ID NO:230), EDN (SEQ ID NO:231), and QSFDSASLWV (SEQ ID NO:232) respectively; (c) a heavy chain with three CDRs comprising the amino acid sequences GGSIRTHS (SEQ ID NO:99), IHHSGAT (SEQ ID NO:100), and ARGPGILSY (SEQ ID NO:101) respectively and/or a light chain with three CDRs comprising the amino acid sequences SSNIGSND (SEQ ID NO:233), SNN (SEQ ID NO:234), and ATWDDSLSAGV (SEQ ID NO:235) respectively; (d) a heavy chain with three CDRs comprising the amino acid sequences GDSVSSYSDA (SEQ ID NO:102), TYYRSKWYN (SEQ ID NO:103), and AREIVATTPFRNYYYGMDV (SEQ ID NO:104) respectively and/or a light chain with three CDRs comprising the amino acid sequences SGSIASNY (SEQ ID NO:236), QDK (SEQ ID NO:237), and QSYDSSSLWV (SEQ ID NO:238) respectively; (e) a heavy chain with three CDRs comprising the amino acid sequences GFTFSHYD (SEQ ID NO:105), IGYDGTNL (SEQ ID NO: 106), and ARAANYYDSSGYGRADAFDI (SEQ ID NO:107) respectively and/or a light chain with three CDRs comprising the amino acid sequences TGSIAGNY (SEQ ID NO:239), DDN (SEQ ID NO:240), and QSYDSGNRGV (SEQ ID NO:241) respectively; (f) a heavy chain with three CDRs comprising the amino acid sequences GFTFSDFP (SEQ ID NO:108), ISYDGNIK (SEQ ID NO:109), and AARGGSSFDI (SEQ ID NO:2780) respectively and/or a light chain with three CDRs comprising the amino acid sequences TSNIGNNA (SEQ ID NO:242), YNE (SEQ ID NO:243), and AAWDDSLSGHVV (SEQ ID NO:244) respectively; (g) a heavy chain with three CDRs comprising the amino acid sequences GFSLSTTGVG (SEQ ID NO:111), IYWNDDK (SEQ ID NO:112), and ARISGSGYFYPFDI (SEQ ID NO:113) respectively and/or a light chain with three CDRs comprising the amino acid sequences SGSIASNY (SEQ ID NO:245), EDN (SEQ ID NO:246), and QSYDSSSLWV (SEQ ID NO:247) respectively; (h) a heavy chain with three CDRs comprising the amino acid sequences GYTFSDYY (SEQ ID NO: 120), IDPNSGGT (SEQ ID NO:121), and ARDRGRGGQAGAFDY (SEQ ID NO:978) respectively and/or a light chain with three CDRs comprising the amino acid sequences KIGSKS (SEQ ID NO:254), DDS (SEQ ID NO:255), and HVWDSSSDQNV (SEQ ID NO:256) respectively; (i) a heavy chain with three CDRs comprising the amino acid sequences GFTFSSYA (SEQ ID NO:122), ISYGGSNK (SEQ ID NO:123), and AKVRGSGWYWGSAFDI (SEQ ID NO:124) respectively and/or a light chain with three CDRs comprising the amino acid sequences SLRAYF (SEQ ID NO:257), GQD (SEQ ID NO:258), and NSRDSGENHLI (SEQ ID NO:259) respectively; (j) a heavy chain with three CDRs comprising the amino acid sequences GYSFTGSH (SEQ ID NO:125), INPDSGVI (SEQ ID NO:126), and ARDKAIGYVWALDY (SEQ ID NO:127) respectively and/or a light chain with three CDRs comprising the amino acid sequences SSDVGTYNR (SEQ ID NO:260), EVS (SEQ ID NO:261), and SSYTRTFTYV (SEQ ID NO:262) respectively; (k) a heavy chain with three CDRs comprising the amino acid sequences GVSLDTIGMR (SEQ ID NO:128), IDWDDDK (SEQ ID NO: 129), and ARSGLLYDLDV (SEQ ID NO:130) respectively and/or a light chain with three CDRs comprising the amino acid sequences DSDIGANF (SEQ ID NO:263), RNT (SEQ ID NO:264), and QSYDSSLSAYV (SEQ ID NO:265) respectively; (1) a heavy chain with three CDRs comprising the amino acid sequences GYSFTSYW (SEQ ID NO:134), IYPGDSDT (SEQ ID NO:135), and ARGWQWHDY (SEQ ID NO:136) respectively and/or a light chain with three CDRs comprising the amino acid sequences SLRSYY (SEQ ID NO:269), DKD (SEQ ID NO:270), and NSRDRSDNHVV (SEQ ID NO:271) respectively; (m) a heavy chain with three CDRs comprising the amino acid sequences GDSVSSRSSA (SEQ ID NO:137), TYYRSNWNY (SEQ ID NO:138), and VRNMRPDFDL (SEQ ID NO:139) respectively and/or a light chain with three CDRs comprising the amino acid sequences QSVSNN (SEQ ID NO:272), DAT (SEQ ID NO:273), and QQYDNLPV (SEQ ID NO:274) respectively; (n) a heavy chain with three CDRs comprising the amino acid sequences GYTFTTSG (SEQ ID NO:140), ISAYNGNT (SEQ ID NO:141), and ARDFHLYYGMDV (SEQ ID NO:142) respectively and/or a light chain with three CDRs comprising the amino acid sequences SSDVGAYNY (SEQ ID NO:275), DVT (SEQ ID NO:276), and AVWDDGLNGRVV (SEQ ID NO:277) respectively; (o) a heavy chain with three CDRs comprising the amino acid sequences GGTFSSYA (SEQ ID NO:143), INPNSGGT (SEQ ID NO:144), and ARGSGGYYLG (SEQ ID NO:145) respectively and/or a light chain with three CDRs comprising the amino acid sequences SNNVGNQG (SEQ ID NO:278), MNN (SEQ ID NO:279), and SAWDSSLSRWV (SEQ ID NO:280) respectively; (p) a heavy chain with three CDRs comprising the amino acid sequences GGTFSSYT (SEQ ID NO: 146), IIPILGTP (SEQ ID NO: 147), and AVGSGWYSGFDY (SEQ ID NO:148) respectively and/or a light chain with three CDRs comprising the amino acid sequences SGSIASNY (SEQ ID NO:281), EDS (SEQ ID NO:282), and QSFHNSNPVI (SEQ ID NO:283) respectively; (q) a heavy chain with three CDRs comprising the amino acid sequences GFTFSSYW (SEQ ID NO:149), IKQDGSEK (SEQ ID NO:150), and ARGFYYYGAFDI (SEQ ID NO:151) respectively and/or a light chain with three CDRs comprising the amino acid sequences SGSIASNY (SEQ ID NO:284), EDN (SEQ ID NO:285), and QSYDSSNHWV (SEQ ID NO:286) respectively; (r) a heavy chain with three CDRs comprising the amino acid sequences GFTFDDYA (SEQ ID NO:152), IDWNSGVI (SEQ ID NO:153), and AKDAYSYGFLGAFDI (SEQ ID NO:154) respectively and/or a light chain with three CDRs comprising the amino acid sequences NIGSKS (SEQ ID NO:287), EDR (SEQ ID NO:288), and QVWDGDSDHYV (SEQ ID NO:289) respectively; (s) a heavy chain with three CDRs comprising the amino acid sequences GFTFDDYA (SEQ ID NO:155), IDWNSGVI (SEQ ID NO:156), and ARDILPSNFDGKKIIVFQPPAKRDLDNYYGMDV (SEQ ID NO:157) respectively and/or a light chain with three CDRs comprising the amino acid sequences SSDVGGYNL (SEQ ID NO:290), EGS (SEQ ID NO:291), and SSYTITDVVV (SEQ ID NO:292) respectively; or (t) a heavy chain with three CDRs comprising the amino acid sequences GYSFTSNW (SEQ ID NO:158), IFPGDSDT (SEQ ID NO:159), and ARESYNAYGS (SEQ ID NO:160) respectively and/or a light chain with three CDRs comprising the amino acid sequences SSNIGSNP (SEQ ID NO:293), SNN (SEQ ID NO:294), and AAWDDSLSGVV (SEQ ID NO:295) respectively.

[0078] In other embodiments, the scFv antibody comprises: (a) a heavy chain with three CDRs comprising the amino acid sequences GFTFTTYG (SEQ ID NO:114), ISYDGSIK (SEQ ID NO:115), and ARVGDSSSYYGIDA (SEQ ID NO:116) respectively, and/or a light chain with three CDRs comprising the amino acid sequences SSNIGSNS (SEQ ID NO:248), SNN (SEQ ID NO:249), and AAWDDSLTGYV (SEQ ID NO:250) respectively; (b) a heavy chain with three CDRs comprising the amino acid sequences GFTFSSHA (SEQ ID NO:117), ISYDGSYT (SEQ ID NO:118), and ARDWVNFGMDV (SEQ ID NO:119) respectively, and/or a light chain with three CDRs comprising the amino acid sequences SSDVGGYNY (SEQ ID NO:251), EVS (SEQ ID NO:252), and AAWDDSLSGPV (SEQ ID NO:253) respectively; or (c) a heavy chain with three CDRs comprising the amino acid sequences GFTFSDYP (SEQ ID NO:131), TSYDGRIK (SEQ ID NO:132), and ARDPGWLRSVGMDV (SEQ ID NO:133) respectively, and/or a light chain with three CDRs comprising the amino acid sequences SGSIARNY (SEQ ID NO:266), ADR (SEQ ID NO:267), and QSYDSSNQAAV (SEQ ID NO:268) respectively. In yet further embodiments, the scFv antibody comprises:
[0079] a) a heavy chain with three CDRs comprising the amino acid sequences GYTFTSYG (SEQ ID NO:161), ISAYNGNT (SEQ ID NO:162), and ARGFPQLGSDY (SEQ ID NO: 163) respectively, and/or a light chain with three CDRs comprising the amino acid sequences SGSIASNY (SEQ ID NO:296), EDN (SEQ ID NO:297), and QAWDSNSYV (SEQ ID NO: 2781) respectively;
[0080] b) a heavy chain with three CDRs comprising the amino acid sequences GGTFSSYA (SEQ ID NO:164), ISGYNGNT (SEQ ID NO:165), and ARQMKDSGNYWEYYYYGMDV (SEQ ID NO:166) respectively, and/or a light chain with three CDRs comprising the amino acid sequences NIGSES (SEQ ID NO:299), EDR (SEQ ID NO:300), and QVWNPSGSLQYV (SEQ ID NO:301) respectively;
[0081] c) a heavy chain with three CDRs comprising the amino acid sequences GYTFTSYG (SEQ ID NO:167), ISTYNGNT (SEQ ID NO:168), and ARDVFGHFDY (SEQ ID NO:169) respectively, and/or a light chain with three CDRs comprising the amino acid sequences SGNIATNY (SEQ ID NO:302), EDN (SEQ ID NO:303), and KSYDDGNHV (SEQ ID NO:304) respectively;
[0082] d) a heavy chain with three CDRs comprising the amino acid sequences GFSLTTTGVS (SEQ ID NO:170), IHWDDDK (SEQ ID NO:171), and ASFIMTVYAEYFED (SEQ ID NO: 172) respectively, and/or a light chain with three CDRs comprising the amino acid sequences QSVSSN (SEQ ID NO:305), DVS (SEQ ID NO:306), and QQRGVWPLT (SEQ ID NO:307) respectively;
[0083] e) a heavy chain with three CDRs comprising the amino acid sequences GFSLSTSAMC (SEQ ID NO:173), IDWDNDR (SEQ ID NO:174), and AHSPYDSIWGSFRPSVYYFDY (SEQ ID NO:175) respectively, and/or a light chain with three CDRs comprising the amino acid sequences SGSIVSSY (SEQ ID NO:308), EHN (SEQ ID NO:309), and QSYDSQNGV (SEQ ID NO:310) respectively;
[0084] f) a heavy chain with three CDRs comprising the amino acid sequences GFTFSDYY (SEQ ID NO:176), ISSSSSDT (SEQ ID NO:177), and AMPTREPAY (SEQ ID NO:178) respectively, and/or a light chain with three CDRs comprising the amino acid sequences SSDLGTYNY (SEQ ID NO:311), DVF (SEQ ID NO:312), and SSYTSSSTYV (SEQ ID NO:313) respectively;
[0085] g) a heavy chain with three CDRs comprising the amino acid sequences GFAFSDFP (SEQ ID NO: 179), ISYDGSLK (SEQ ID NO:180), and AREGVSNSRPFDH (SEQ ID NO:181) respectively, and/or a light chain with three CDRs comprising the amino acid sequences SIGTKS (SEQ ID NO: 314), DDS (SEQ ID NO: 2782), and QVWESDDDDLV (SEQ ID NO:316) respectively;
[0086] h) a heavy chain with three CDRs comprising the amino acid sequences GFTFSSYA (SEQ ID NO:182), ISSNGGST (SEQ ID NO:183), and TRDLWSGSADSFDI (SEQ ID NO:184) respectively, and/or a light chain with three CDRs comprising the amino acid sequences SLRRYY (SEQ ID NO: 317), GKN (SEQ ID NO:318), and NSRDISDNQWQWI (SEQ ID NO:319) respectively;
[0087] i) a heavy chain with three CDRs comprising the amino acid sequences GFPFNAYY (SEQ ID NO:185), INQDGSEK (SEQ ID NO:186), and ARLYWWGMDV (SEQ ID NO:187) respectively, and/or a light chain with three CDRs comprising the amino acid sequences SSDVGGYKY (SEQ ID NO:320), DVN (SEQ ID NO:321), and SSYTGRMNLYV (SEQ ID NO:322) respectively;
[0088] j) a heavy chain with three CDRs comprising the amino acid sequences GFTFDDYA (SEQ ID NO:188), IDWNSGVI (SEQ ID NO:189), and AKDAYSYGFLGAFDI (SEQ ID NO:190) respectively, and/or a light chain with three CDRs comprising the amino acid sequences NIRTKG (SEQ ID NO:323), YAS (SEQ ID NO:324), and QVWDSSSDLVV (SEQ ID NO:325) respectively;
[0089] k) a heavy chain with three CDRs comprising the amino acid sequences GFTFDDYA (SEQ ID NO:191), ISWNSGSI (SEQ ID NO:192), and ARDWWGSIDH (SEQ ID NO:193) respectively, and/or a light chain with three CDRs comprising the amino acid sequences SSDVGGYDY (SEQ ID NO:326), DVS (SEQ ID NO:327), and SSYTSSSPVV (SEQ ID NO:328) respectively;
[0090] l) a heavy chain with three CDRs comprising the amino acid sequences GGSISSSNW (SEQ ID NO:194), IYHSGST (SEQ ID NO:195), and ARRGGTYHRGAFDI (SEQ ID NO:196) respectively, and/or a light chain with three CDRs comprising the amino acid sequences SRDVGSYDL (SEQ ID NO:329), EGS (SEQ ID NO:330), and SSYTSSNSLV (SEQ ID NO:331) respectively;
[0091] m) a heavy chain with three CDRs comprising the amino acid sequences GASISNSF (SEQ ID NO:197), TSYSGNS (SEQ ID NO:198), and ARREWIKGHFDY (SEQ ID NO:199) respectively, and/or a light chain with three CDRs comprising the amino acid sequences GGSIASNY (SEQ ID NO:332), EDN (SEQ ID NO:333), and QSYDSSNPVV (SEQ ID NO:334) respectively;
[0092] n) a heavy chain with three CDRs comprising the amino acid sequences GGSFTTHS (SEQ ID NO:200), ILPGGAT (SEQ ID NO:201), and ARGPGILSY (SEQ ID NO:202) respectively, and/or a light chain with three CDRs comprising the amino acid sequences SSIGSND (SEQ ID NO:335), SNN (SEQ ID NO:336), and AWDDSLSAVV (SEQ ID NO:337) respectively;
[0093] o) a heavy chain with three CDRs comprising the amino acid sequences GGSFRTHS (SEQ ID NO:203), IHHSGAT (SEQ ID NO:204), and ARGPGILSY (SEQ ID NO:205) respectively, and/or a light chain with three CDRs comprising the amino acid sequences SSNIGSNT (SEQ ID NO:338), INN (SEQ ID NO:339), and AEWYDSLNVHYV (SEQ ID NO:340) respectively;
[0094] p) a heavy chain with three CDRs comprising the amino acid sequences GGSIRTHS (SEQ ID NO:206), IHHSGAT (SEQ ID NO:207), and ARGPGILSY (SEQ ID NO:208) respectively, and/or a light chain with three CDRs comprising the amino acid sequences SSNIGSNT (SEQ ID NO:341), INN (SEQ ID NO:342), and AECYDSLNDHYV (SEQ ID NO:343) respectively;
[0095] q) a heavy chain with three CDRs comprising the amino acid sequences GGSIRTHS (SEQ ID NO:209), IHHSGAT (SEQ ID NO:210), and GRGPGILSY (SEQ ID NO:211) respectively, and/or a light chain with three CDRs comprising the amino acid sequences SSNIGSNT (SEQ ID NO:344), SNN (SEQ ID NO:345), and AAWDDSLNVHYV (SEQ ID NO:346) respectively;
[0096] r) a heavy chain with three CDRs comprising the amino acid sequences GYSFTSYW (SEQ ID NO:212), IYPGDSDT (SEQ ID NO:213), and ARQGDGGGYDY (SEQ ID NO:214) respectively, and/or a light chain with three CDRs comprising the amino acid sequences SSNIGSNP (SEQ ID NO:347), NNN (SEQ ID NO:348), and AAWDDSLNGL (SEQ ID NO:349) respectively;
[0097] s) a heavy chain with three CDRs comprising the amino acid sequences RYSFSNYW (SEQ ID NO:215), IYPYDSDT (SEQ ID NO:216), and ARQGSSQSFDI (SEQ ID NO:217) respectively, and/or a light chain with three CDRs comprising the amino acid sequences SLRSYY (SEQ ID NO:350), QDS (SEQ ID NO: 2783), and QAWDSNSYV (SEQ ID NO: 2781) respectively;
[0098] t) a heavy chain with three CDRs comprising the amino acid sequences GYSFTSYW (SEQ ID NO:218), IYPGDSDT (SEQ ID NO:219), and ARRRGSAAAFDT (SEQ ID NO:220) respectively, and/or a light chain with three CDRs comprising the amino acid sequences SSNIGSNP (SEQ ID NO:353), DNN (SEQ ID NO:354), and EAWDDSLSGPV (SEQ ID NO:355) respectively;
[0099] u) a heavy chain with three CDRs comprising the amino acid sequences GYSFTSYW (SEQ ID NO:221), IYPGDSDT (SEQ ID NO:222), and ARTTYSYGSFDY (SEQ ID NO:223) respectively, and/or a light chain with three CDRs comprising the amino acid sequences SSNIGGNS (SEQ ID NO:356), RNN (SEQ ID NO:357), and AAWDDSLNGWV (SEQ ID NO:358) respectively; or
[0100] v) a heavy chain with three CDRs comprising the amino acid sequences GDSVTSNSAA (SEQ ID NO:224), TYYSSKWYN (SEQ ID NO:225), and ARGWLRLSFDP (SEQ ID NO:226) respectively, and/or a light chain with three CDRs comprising the amino acid sequences SGSIASNY (SEQ ID NO:359), EDN (SEQ ID NO:360), and QSYDPNNHGVV (SEQ ID NO:361) respectively.

[0101] In other embodiments, the scFv antibody comprises: a) a heavy chain with three CDRs comprising the amino acid sequences GFSLSTSGVG (SEQ ID NO:754), IYWDDDK (SEQ ID NO:755), and ARISGSGYFYPFDI (SEQ ID NO:756) respectively, and/or a light chain with three CDRs comprising the amino acid sequences SGSIASNY (SEQ ID NO:802), EDN (SEQ ID NO:803), and QSYDSSNLWV (SEQ ID NO:804) respectively; b) a heavy chain with three CDRs comprising the amino acid sequences GDSVSSNSAA (SEQ ID NO:757), TYYRSRWYN (SEQ ID NO:758), and AREIRGFDY (SEQ ID NO:759) respectively, and/or a light chain with three CDRs comprising the amino acid sequences SSDVGAYNF (SEQ ID NO:805), DFN (SEQ ID NO:806), and SSYAGSNNFDVV (SEQ ID NO:807) respectively; c) a heavy chain with three CDRs comprising the amino acid sequences GFTFGDYA (SEQ ID NO:760), IRSKAYGGTT (SEQ ID NO:761), and TTADDDMDV (SEQ ID NO:762) respectively, and/or a light chain with three CDRs comprising the amino acid sequences SGTIASNY (SEQ ID NO:808), EDN (SEQ ID NO:809), and QSYDTSNHYV (SEQ ID NO:810) respectively; d) a heavy chain with three CDRs comprising the amino acid sequences GFTFSNYG (SEQ ID NO:763), IWERGSKK (SEQ ID NO:764), and AREGISMTGAEYFQH (SEQ ID NO:765) respectively, and/or a light chain with three CDRs comprising the amino acid sequences SSNIGAGYD (SEQ ID NO:811), GTN (SEQ ID NO:812), and QSYDNSLTDPYV (SEQ ID NO:813) respectively; e) a heavy chain with three CDRs comprising the amino acid sequences GFTFDDYA (SEQ ID NO:766), IDWNSGVI (SEQ ID NO:767), and AKDIGPGGSGSYYAFDI (SEQ ID NO:768) respectively, and/or a light chain with three CDRs comprising the amino acid sequences SSDVGGSKY (SEQ ID NO:814), DVT (SEQ ID NO:815), and AAWDDSLNGVV (SEQ ID NO:816) respectively; f) a heavy chain with three CDRs comprising the amino acid sequences GFSFSRYG (SEQ ID NO:769), IRHDGSKK (SEQ ID NO:770), and AKDGRLEAALDD (SEQ ID NO:771) respectively, and/or a light chain with three CDRs comprising the amino acid sequences SGSIANNF (SEQ ID NO:817), EDN (SEQ ID NO:818), and QSYDSSNLV (SEQ ID NO:819) respectively; g) a heavy chain with three CDRs comprising the amino acid sequences GYSFTSYW (SEQ ID NO:772), IYPGDSDT (SEQ ID NO:773), and ARRGDLDAFDI (SEQ ID NO:774) respectively, and/or a light chain with three CDRs comprising the amino acid sequences SANIGSNA (SEQ ID NO:820), GNT (SEQ ID NO:821), and AAWDDSLNGYV (SEQ ID NO:822) respectively; h) a heavy chain with three CDRs comprising the amino acid sequences GYRLSDYY (SEQ ID NO:775), IKQDGSEK (SEQ ID NO:776), and ARVRGWSRGYFDY (SEQ ID NO:777) respectively, and/or a light chain with three CDRs comprising the amino acid sequences SGSIASNY (SEQ ID NO:823), EDN (SEQ ID NO:824), and QSYDSSNHWV (SEQ ID NO:825) respectively; i) a heavy chain with three CDRs comprising the amino acid sequences GFTFDDYA (SEQ ID NO:778), ISWNSGSI (SEQ ID NO:779), and ARDWWGSIDH (SEQ ID NO:780) respectively, and/or a light chain with three CDRs comprising the amino acid sequences SSDVGGYDY (SEQ ID NO:826), DVS (SEQ ID NO:827), and SSYTSSSPVV (SEQ ID NO:828) respectively; j) a heavy chain with three CDRs comprising the amino acid sequences GFTFSHYD (SEQ ID NO:781), IGYDGTNL (SEQ ID NO:782), and ARAANYYDSSGYGRADAF (SEQ ID NO:2784) respectively, and/or a light chain with three CDRs comprising the amino acid sequences TGSIAGNY (SEQ ID NO:829), DDN (SEQ ID NO:830), and QSYDSGNRGV (SEQ ID NO:831) respectively; k) a heavy chain with three CDRs comprising the amino acid sequences GGTFSTYG (SEQ ID NO:784), IIPSLGIP (SEQ ID NO:785), and ARENIDLATNDF (SEQ ID NO:786) respectively, and/or a light chain with three CDRs comprising the amino acid sequences SRDIGAYGY (SEQ ID NO:832), EVR (SEQ ID NO:833), and SSYTSSSTLDVV (SEQ ID NO:834) respectively; 1) a heavy chain with three CDRs comprising the amino acid sequences GGTFSSSG (SEQ ID NO:787), IIPMLGTP (SEQ ID NO:788), and ARDGGNYDY (SEQ ID NO:789) respectively, and/or a light chain with three CDRs comprising the amino acid sequences SSNIGRNA (SEQ ID NO:835), SNN (SEQ ID NO:836), and SAWDTSLSTWV (SEQ ID NO:837) respectively; m) a heavy chain with three CDRs comprising the amino acid sequences GFTFSSYW (SEQ ID NO:790), IKQDGSEK (SEQ ID NO:791), and ARGFYYYGAFDI (SEQ ID NO:792) respectively, and/or a light chain with three CDRs comprising the amino acid sequences SGSIASNY (SEQ ID NO:838), EDN (SEQ ID NO:839), and QSYDSSNHWV (SEQ ID NO:840) respectively; n) a heavy chain with three CDRs comprising the amino acid sequences GFTFDDYA (SEQ ID NO:793), IDWNSGVI (SEQ ID NO:794), and AKDAYSYGFLGAFDI (SEQ ID NO:795) respectively, and/or a light chain with three CDRs comprising the amino acid sequences NIRTKG (SEQ ID NO:841), YAS (SEQ ID NO:842), and QVWDSSSDLVV (SEQ ID NO:843) respectively; o) a heavy chain with three CDRs comprising the amino acid sequences GYSFTGSH (SEQ ID NO:796), INPDSGVI (SEQ ID NO:797), and ARDKAIGYVWALDY (SEQ ID NO:798) respectively, and/or a light chain with three CDRs comprising the amino acid sequences SSDVGTYNR (SEQ ID NO:844), EVS (SEQ ID NO:845), and SSYTRTFTYV (SEQ ID NO:846) respectively; or p) a heavy chain with three CDRs comprising the amino acid sequences GASISNSF (SEQ ID NO:799), TSYSGNS (SEQ ID NO:800), and ARREWIKGHFDY (SEQ ID NO:801) respectively, and/or a light chain with three CDRs comprising the amino acid sequences GGSIASNY (SEQ ID NO:847), EDN (SEQ ID NO:848), and QSYDSSNPVV (SEQ ID NO:849) respectively. In embodiments, the scFv antibody comprises a heavy chain with three CDRs comprising the amino acid sequences GFSLTTSGVS (SEQ ID NO:983), IHWDDDK (SEQ ID NO:984), and ASFIMTVYAEYFED (SEQ ID NO:985) respectively, and/or a light chain with three CDRs comprising the amino acid sequences QSVSSN (SEQ ID NO:986), DVS (SEQ ID NO:987), and QQRGAWPLT (SEQ ID NO:988) respectively

[0102] In other embodiments, the scFv antibody comprises:
[0103] a. a V_{H} amino acid sequence having SEQ ID NO: 1, and a V_{L} amino acid sequence having SEQ ID NO: 2;
[0104] b. a V_{H} amino acid sequence having SEQ ID NO: 3, and a V_{L} amino acid sequence having SEQ ID NO: 4;
[0105] c. a V_{H} amino acid sequence having SEQ ID NO: 5, and a V_{L} amino acid sequence having SEQ ID NO: 6;
[0106] d. a V_{H} amino acid sequence having SEQ ID NO: 7, and a V_{L} amino acid sequence having SEQ ID NO: 8;
[0107] e. a V_{H} amino acid sequence having SEQ ID NO: 9, and a V_{L} amino acid sequence having SEQ ID NO: 10;
[0108] f. a V_{H} amino acid sequence having SEQ ID NO: 11, and a V_{L} amino acid sequence having SEQ ID NO: 12;
[0109] g. a V_{H} amino acid sequence having SEQ ID NO: 13, and a V_{L} amino acid sequence having SEQ ID NO: 14;
[0110] h. a V_{H} amino acid sequence having SEQ ID NO: 19, and a V_{L} amino acid sequence having SEQ ID NO: 20;
[0111] i. a V_{H} amino acid sequence having SEQ ID NO: 21, and a V_{L} amino acid sequence having SEQ ID NO: 22;
[0112] j. a V_{H} amino acid sequence having SEQ ID NO: 23, and a V_{L} amino acid sequence having SEQ ID NO: 24;
[0113] k. a V_{H} amino acid sequence having SEQ ID NO: 25, and a V_{L} amino acid sequence having SEQ ID NO: 26;
[0114] l. a V_{H} amino acid sequence having SEQ ID NO: 29, and a V_{L} amino acid sequence having SEQ ID NO: 30;
[0115] m. a V_{H} amino acid sequence having SEQ ID NO: 31, and a V_{L} amino acid sequence having SEQ ID NO: 32;
[0116] n. a V_{H} amino acid sequence having SEQ ID NO: 33, and a V_{L} amino acid sequence having SEQ ID NO: 34;
[0117] o. a V_{H} amino acid sequence having SEQ ID NO: 35, and a V_{L} amino acid sequence having SEQ ID NO: 36;
[0118] p. a V_{H} amino acid sequence having SEQ ID NO: 37, and a V_{L} amino acid sequence having SEQ ID NO: 38;
[0119] q. a V_{H} amino acid sequence having SEQ ID NO: 39, and a V_{L} amino acid sequence having SEQ ID NO: 40;
[0120] r. a V_{H} amino acid sequence having SEQ ID NO: 41, and a V_{L} amino acid sequence having SEQ ID NO: 42;
[0121] s. a V_{H} amino acid sequence having SEQ ID NO: 43, and a V_{L} amino acid sequence having SEQ ID NO: 44; or
[0122] t. a V_{H} amino acid sequence having SEQ ID NO: 47, and a V_{L} amino acid sequence having SEQ ID NO: 48.

[0123] In some embodiments, the scFv antibody comprises: (a) a V_{H} amino acid sequence having SEQ ID NO: 15, and a V_{L} amino acid sequence having SEQ ID NO: 16; (b) a V_{H} amino acid sequence having SEQ ID NO: 17, and a V_{L} amino acid sequence having SEQ ID NO: 18; or (c) a V_{H} amino acid sequence having SEQ ID NO: 27, and a V_{L} amino acid sequence having SEQ ID NO: 28. In other embodiments, the scFv antibody comprises:
[0124] a. a V_{H} amino acid sequence having SEQ ID NO: 49, and a V_{L} amino acid sequence having SEQ ID NO: 50;
[0125] b. a V_{H} amino acid sequence having SEQ ID NO: 51, and a V_{L} amino acid sequence having SEQ ID NO: 52;
[0126] c. a V_{H} amino acid sequence having SEQ ID NO: 53, and a V_{L} amino acid sequence having SEQ ID NO: 54;
[0127] d. a V_{H} amino acid sequence having SEQ ID NO: 55, and a V_{L} amino acid sequence having SEQ ID NO: 56;
[0128] e. a V_{H} amino acid sequence having SEQ ID NO: 57, and a V_{L} amino acid sequence having SEQ ID NO: 58;
[0129] f. a V_{H} amino acid sequence having SEQ ID NO: 59, and a V_{L} amino acid sequence having SEQ ID NO: 60;
[0130] g. a V_{H} amino acid sequence having SEQ ID NO: 61, and a V_{L} amino acid sequence having SEQ ID NO: 62;
[0131] h. a V_{H} amino acid sequence having SEQ ID NO: 63, and a V_{L} amino acid sequence having SEQ ID NO: 64;
[0132] i. a V_{H} amino acid sequence having SEQ ID NO: 65, and a V_{L} amino acid sequence having SEQ ID NO: 66;
[0133] j. a V_{H} amino acid sequence having SEQ ID NO: 67, and a V_{L} amino acid sequence having SEQ ID NO: 68;
[0134] k. a V_{H} amino acid sequence having SEQ ID NO: 69, and a V_{L} amino acid sequence having SEQ ID NO: 70;
[0135] l. a V_{H} amino acid sequence having SEQ ID NO: 71, and a V_{L} amino acid sequence having SEQ ID NO: 72;
[0136] m. a V_{H} amino acid sequence having SEQ ID NO: 73, and a V_{L} amino acid sequence having SEQ ID NO: 74;
[0137] n. a V_{H} amino acid sequence having SEQ ID NO: 75, and a V_{L} amino acid sequence having SEQ ID NO: 76;
[0138] o. a V_{H} amino acid sequence having SEQ ID NO: 77, and a V_{L} amino acid sequence having SEQ ID NO: 78;
[0139] p. a V_{H} amino acid sequence having SEQ ID NO: 79, and a V_{L} amino acid sequence having SEQ ID NO: 80;
[0140] q. a V_{H} amino acid sequence having SEQ ID NO: 81, and a V_{L} amino acid sequence having SEQ ID NO: 82;
[0141] r. a V_{H} amino acid sequence having SEQ ID NO: 83, and a V_{L} amino acid sequence having SEQ ID NO: 84;
[0142] s. a V_{H} amino acid sequence having SEQ ID NO: 85, and a V_{L} amino acid sequence having SEQ ID NO: 86;
[0143] t. a V_{H} amino acid sequence having SEQ ID NO: 87, and a V_{L} amino acid sequence having SEQ ID NO: 88;
[0144] u. a V_{H} amino acid sequence having SEQ ID NO: 89, and a V_{L} amino acid sequence having SEQ ID NO: 90; or
[0145] v. a V_{H} amino acid sequence having SEQ ID NO: 91, and a V_{L} amino acid sequence having SEQ ID NO: 92.

[0146] In other embodiments, the scFv antibody comprises: a) a VH amino acid sequence having SEQ ID NO: 722, and a VL amino acid sequence having SEQ ID NO: 723; b) a VH amino acid sequence having SEQ ID NO: 724, and a VL amino acid sequence having SEQ ID NO: 725; c) a VH amino acid sequence having SEQ ID NO: 726, and a VL amino acid sequence having SEQ ID NO: 727; d) a VH amino acid sequence having SEQ ID NO: 728, and a VL amino acid sequence having SEQ ID NO: 729; e) a VH amino acid sequence having SEQ ID NO: 730, and a VL amino acid sequence having SEQ ID NO: 731; f) a VH amino acid sequence having SEQ ID NO: 732, and a VL amino acid sequence having SEQ ID NO: 733; g) a VH amino acid sequence having SEQ ID NO: 734, and a VL amino acid sequence having SEQ ID NO: 735; h) a VH amino acid sequence having SEQ ID NO: 736, and a VL amino acid sequence having SEQ ID NO: 737; i) a VH amino acid sequence having SEQ ID NO: 738, and a VL amino acid sequence having SEQ ID NO: 739; j) a VH amino acid sequence having SEQ ID NO: 740, and a VL amino acid sequence having SEQ ID NO: 741; k) a VH amino acid sequence having SEQ ID NO: 742, and a VL amino acid sequence having SEQ ID NO: 743; 1) a VH amino acid sequence having SEQ ID NO: 744, and a VL amino acid sequence having SEQ ID NO: 745; m) a VH amino acid sequence having SEQ ID NO: 746, and a VL amino acid sequence having SEQ ID NO: 747; n) a VH amino acid sequence having SEQ ID NO: 748, and a VL amino acid sequence having SEQ ID NO: 749; o) a VH amino acid sequence having SEQ ID NO: 750, and a VL amino acid sequence having SEQ ID NO: 751; or p) a VH amino acid sequence having SEQ ID NO: 752, and a VL amino acid sequence having SEQ ID NO: 753. In embodiments, the scFv antibody comprises a VH amino acid sequence having SEQ ID NO: 981, and a VL amino acid sequence having SEQ ID NO: 982.

[0147] An aspect of the invention is directed to methods of preventing a disease or disorder caused by a Severe Acute Respiratory Syndrome coronavirus (SARS-CoV2). In some embodiments, the method comprises administering to a subject at risk of suffering from the disease or disorder, a therapeutically effective amount of the monoclonal antibody described herein or the scFv antibody described herein. In some embodiments, the method further comprises administering an anti-viral drug, a viral entry inhibitor, a viral attachment inhibitor, or a combination thereof. In some embodiments, the method comprises administering two or more antibodies specific to SARS-CoV2. In some embodiments, the antibody is administered prior to or after exposure to SARS-CoV2. In other embodiments, the antibody is administered at a dose sufficient to neutralize the SARS-CoV2.

[0148] An aspect of the invention is directed to methods of delaying the onset of one or more symptoms of a SARS-CoV2 infection. In some embodiments, the method comprises administering to a subject at risk of suffering from the disease or disorder, a therapeutically effective amount of the monoclonal antibody described herein or the scFv antibody described herein. In some embodiments, the method further comprises administering an anti-viral drug, a viral entry inhibitor, a viral attachment inhibitor, or a combination thereof. In some embodiments, the method comprises administering two or more antibodies specific to SARS-CoV2. In some embodiments, the antibody is administered prior to or after exposure to SARS-CoV2. In other embodiments, the antibody is administered at a dose sufficient to neutralize the SARS-CoV2.

[0149] An aspect of the invention is directed to compositions comprising the monoclonal antibody described herein or the scFv antibody described herein, and a carrier.

[0150] An aspect of the invention is directed to methods of detecting the presence of SARS-CoV2 in a sample. In some embodiments, the method comprising: (a) contacting the sample with the monoclonal antibody described herein or the scFv antibody described herein; and detecting the presence or absence of an antibody-antigen complex, thereby detecting the presence of SARS-CoV2 in a sample. In some embodiments, the detecting occurs in vivo. In other embodiments, the sample is obtained from blood, hair, cheek scraping, saliva, biopsy, or semen.

[0151] Unless otherwise defined, all technical and scientific terms used herein can have the same meaning as commonly understood by one of ordinary skill in the art to which this invention belongs. Although methods and materials similar or equivalent to those described herein can be used in the practice or testing of the present invention, suitable methods and materials are described below. All publications, patent applications, patents, and other references mentioned herein are incorporated by reference in their entirety. In the case of conflict, the present specification, including definitions, will control. In addition, the materials, methods, and examples are illustrative only and are not intended to be limiting.

[0152] Other features and advantages of the invention will be apparent from and are encompassed by the following detailed description and claims.

### BRIEF DESCRIPTION OF THE DRAWINGS

[0153] FIG. 1A-FIG. 1P shows the amino acid sequences of the heavy chain and light chain regions of the antibodies directed to SARS-COV-2. Figure discloses SEQ ID NOS 1564-1931, respectively in order of columns (CDR1, CDR2, CDR3, full-length sequence).

[0154] FIG. 2 shows a panning strategy (soluble protein).

[0155] FIG. 3 shows screening results.

[0156] FIG. 4 shows purified phage binding curves (RBD-Fc). The curves are made by coating plates with 1 μg/ml of either SARS-COV-2 RBD-Fc or IL2-Fc (negative control) or blocking buffer only. Phage binding was detected by anti-M13-HRP; Negative curves plotted with the positive samples are against blocking buffer; Negative curves on the slides after are against IL2-Fc (1 μg/ml).

[0157] FIG. 5 shows EC50 values for purified phage against RBD-Fc. Red names had ambiguous curve fitting. Consult graphs for data reliability.

[0158] FIG. 6 shows Fc coat negative binding curves.

[0159] FIG. 7 shows purified phage binding against S1 protein. Negatives are also graphed.

[0160] FIG. 8 shows SARS-RBD-Fc ACE2 binding curve. These curves are made by coating plates with 1 μg/ml of either SARS-COV-2 RBD-Fc or IL2-Fc (negative control). Phage binding was detected by anti-M13-HRP; negative curves are plotted for each phage on the same graph.

[0161] FIG. 9 shows anti-RBD competition with ACE2. The red box on plate 1 shows exemplary clones of interest. These clones appear to demonstrate at least a partial ability to block RBD-ACE2 binding.

[0162] FIG. 10 shows a detailed look at the 7 anti-RBD clones that shows differential ELISA signal in blocking experiment. In this experiment, if the red bar is below that of the purple bar, it indicates that there is competition of the phage with ACE2.

[0163] FIG. 11 shows a RBD phage competition curve.

[0164] FIG. 12 shows the amino acid sequences of the heavy chain and light chain regions of the antibodies directed to SARS-COV-2. The asterisks are amber/stop codons. In the TG1 bacterial cells, they are mutated such that the TAG stop codon is read as a Q (glutamine). When the IMGT numbering is used to break the DNA sequence down into FW/CDRs, the system does not recognize an amber suppressor so a stop codon is assumed, but in the phage the codon is read as a Q. The sequences are later re-cloned such that the TAG is changed to the codons for Q. The periods are also from the IMGT system. In the numbering system they use, each FW/CDR needs to have a certain number of residues, so the periods are just used as gaps to make the beginning and the end of the segments fit their numbering scheme. Figure discloses SEQ ID NOS 1564-1931, respectively in order of columns (CDR1, CDR2, CDR3, full-length sequence).

[0165] FIG. 13 is a table of KD measurements. KD values were measured on Octet with SA sensors. All abs are scFv-Fc format except for CR3022. Sensors were coated with 2.5 ug/ml Biotinylated SARS-CoV-2 S1 protein (ACRO, S1N-C82E8). Abs were run at 3 concentrations, 25-12.5-6.25 nM and the kinetic parameters were calculated by linking the three curves. Control sensor was coated with biotinylated PD1 and 25 nM antibody was allowed to bind.

[0166] FIG. 14 shows graphs of kinetic measurements.

[0167] FIG. 15 shows the nucleic acid sequences of the heavy chain and light chain regions of antibodies directed to SARS-COV-2. Figure discloses SEQ ID NOS 1932-2291, respectively in order of columns (CDR1, CDR2, CDR3, full-length sequence).

[0168] FIG. 16 shows a phylogenetic tree of the coronavirus family and schematics of the viruses taken from Li, F. (2016). Structure, Function, and Evolution of Coronavirus Spike Proteins. Annu Rev Virol. http://doi.org/doi:10.1146/annurev-virology-110615-042301. The figure is an introduction to coronaviruses and their spike proteins. (a) Classification of coronaviruses. Representative coronaviruses in each genus are human coronavirus NL63 (HCoV-NL63), porcine transmissible gastroenteritis coronavirus (TGEV), porcine epidemic diarrhea coronavirus (PEDV), and porcine respiratory coronavirus (PRCV) in the genus Alphacoronavirus; severe acute respiratory syndrome coronavirus (SARS-CoV), Middle East respiratory syndrome coronavirus (MERS-CoV), bat coronavirus HKU4, mouse hepatitis coronavirus (MHV), bovine coronavirus (BCoV), and human coronavirus OC43 in the genus Betacoronavirus; avian infectious bronchitis coronavirus (IBV) in the genus Gammacoronavirus; and porcine deltacoronavirus (PdCV) in the genus Deltacoronavirus. (b) Schematic of the overall structure of prefusion coronavirus spikes. Shown are the receptor-binding subunit S1, the membrane-fusion subunit S2, the transmembrane anchor (TM), the intracellular tail (IC), and the viral envelope. (c) Schematic of the domain structure of coronavirus spikes, including the S1 N-terminal domain (S1-NTD), the S1 C-terminal domain (S1-CTD), the fusion peptide (FP), and heptad repeat regions N and C (HR-N and HR-C). Scissors indicate two proteolysis sites in coronavirus spikes. (d) Summary of the structures and functions of coronavirus spikes. Host receptors recognized by either of the S1 domains are angiotensin-converting enzyme 2 (ACE2), aminopeptidase N (APN), dipeptidyl peptidase 4 (DPP4), carcinoembryonic antigen-related cell adhesion molecule 1 (CEACAMI), and sugar. The available crystal structures of S1 domains and S2 HRs are shown. Their PDB IDs are 3KBH for HCoV-NL63 S1-CTD; 4F5C for PRCV S1-CTD; 2AJF for SARS-CoV S1-CTD; 4KR0 for MERS-CoV S1-CTD; 3R4D for MHIV S1-NTD; 4H14 for BCoV S1-NTD; 2IEQ for HCoV-NL63 HRs; 1WYY for SARS-CoV HRs; 4NJL for MERS-CoV HRs; and 1WDF for MHV HRs.

[0169] FIG. 17 is a schematic of the coronavirus structure adapted from Li, F. (2016). Structure, Function, and Evolution of Coronavirus Spike Proteins. Annu Rev Virol. http://doi.org/doi:10.1146/annurev-virology-110615-042301.

[0170] FIG. 18 is a schematic of the structure of the 2019-nCoV S in the prefusion conformation adapted from Daniel Wrapp et al. Science 2020; 367:1260-1263. (A) Schematic of 2019-nCoV S primary structure colored by domain. Domains that were excluded from the ectodomain expression construct or could not be visualized in the final map are colored white. SS, signal sequence; S2′, S2′ protease cleavage site; FP, fusion peptide; HR1, heptad repeat 1; CH, central helix; CD, connector domain; HR2, heptad repeat 2; TM, transmembrane domain; CT, cytoplasmic tail. Arrows denote protease cleavage sites. (B) Side and top views of the prefusion structure of the 2019-nCoV S protein with a single RBD in the up conformation. The two RBD down protomers are shown as cryo-EM density in either white or gray and the RBD up protomer is shown in ribbons colored corresponding to the schematic in (A).

[0171] FIG. 19 is a schematic of ribbon diagrams showing the structural comparison between 2019-nCoV S and SARS-CoV Sadapted from Daniel Wrapp et al. Science 2020; 367:1260-1263. (A) Single protomer of 2019-nCoV S with the RBD in the down conformation (left) is shown in ribbons colored according to FIG. 1 of Wrapp et al. Science 2020; 367:1260-1263. A protomer of 2019-nCoV S in the RBD up conformation is shown (center) next to a protomer of SARS-CoV S in the RBD up conformation (right), displayed as ribbons and colored white (PDB ID: 6CRZ). (B) RBDs of 2019-nCoV and SARS-CoV aligned based on the position of the adjacent NTD from the neighboring protomer. The 2019-nCoV RBD is colored green and the SARS-CoV RBD is colored white. The 2019-nCoV NTD is colored blue. (C) Structural domains from 2019-nCoV S have been aligned to their counterparts from SARS-CoV S as follows: NTD (top left), RBD (top right), SD1 and SD2 (bottom left), and S2 (bottom right).

[0172] FIG. 20 is a graph showing 2019-nCoV S binds human ACE2 with high affinity adapted from Daniel Wrapp et al. Science 2020; 367:1260-1263. Surface plasmon resonance sensorgram shows the binding kinetics for human ACE2 and immobilized 2019-nCoV S. Data are shown as black lines, and the best fit of the data to a 1:1 binding model is shown in red.

[0173] FIG. 21 shows the antigenicity of the 2019-nCoV RBD adapted from Daniel Wrapp et al. Science 2020; 367:1260-1263. (A) SARS-CoV RBD shown as a white molecular surface (PDB ID: 2AJF), with residues that vary in the 2019-nCoV RBD colored red. The ACE2-binding site is outlined with a black dashed line. (B) Biolayer interferometry sensorgram showing binding to ACE2 by the 2019-nCoV RBD-SD1. Binding data are shown as a black line, and the best fit of the data to a 1:1 binding model is shown in red. (C) Biolayer interferometry to measure cross-reactivity of the SARS-CoV RBD-directed antibodies S230, m396, and 80R. Sensor tips with immobilized antibodies were dipped into wells containing 2019-nCoV RBD-SD1, and the resulting data are shown as a black line.

[0174] FIG. 22 shows tables of the panning process conducted to identify the SARS-CoV2 antibodies described herein.

[0175] FIG. 23 shows a table of the screening process conducted to identify the SARS-CoV2 antibodies described herein. SARS2 was screened via ELISA, ACE2sol was screened against 293T-ACE2 stably transfected cells.

[0176] FIG. 24 is a binding curve showing SARS-RBD-Fc binding to ACE2.

[0177] FIG. 25 outlines the Panning plan.

[0178] FIG. 26 is a graph showing virus infection. GD03 SARS and SARS2 pseudovirus was generated by transfecting LentiX-293T cells. ACE2+ target cells were incubated with varying dilutions of the pseudovirus supernatant for 48 hours before cell lysis and luciferase detection. The SARS2 pseudovirus displays decreased infection compared to the GD03 SARS strain which could be explained by either low production titers or decreased viral entry into the target cells. However, the values for SARS2 are above baseline and can be used for introductory pseudovirus neutralization assays.

[0179] FIG. 27 shows optimization of the pseudovirus.

[0180] FIG. 28 is a graph showing SARS/SARS-CoV2 pseudovirus infection of 293T cells transduced with ACE2. Two SARS-CoV2 spike pseudovirus constructs were used, WT spike and one with the end of the intraviron domain replaced with a gp41 tail. Two preps of pseudovirus were also used, one made in 150 mm plates with 3 day transfection, the second done in 100 mm plates with 2 day incubation (cells were all floating after 2 days). Transfected with Lipofectamine 3000. 10,000 transduced 293T-ACE2 cells were cultured O/N. The next day pseudovirus supernatant was added to the sample in serial 2×dilutions, starting with straight supernatant in the top well. Plates were incubated for 48 hours before the supernatant was removed and cells were lysed with Promega passive lysis buffer. After equilibration period, Promega BioGlow luciferase reagent was added and the plate was read. Interval time was 0.5 sec, and the gain adjustment was at 40%

[0181] FIG. 29 shows a table of the germline assignments for the first set of SARS-CoV2 antibodies identified.

[0182] FIG. 30 shows sequence alignments of SARS-CoV2 antibodies identified. Figure discloses SEQ ID NOS 2292-2311, respectively in order of appearance.

[0183] FIG. 31 shows a table of the binding affinities for the first set of SARS-CoV2 antibodies identified. KD values measured on Octet with SA (streptavidin) sensors. All abs are scFv-Fc format except for CR3022. Sensors were coated with 2.5 ug/ml Biotinylated SARS-CoV-2 S1 protein (ACRO, S1N-C82E8). Abs were run at 3 concentrations, 25-12.5-6.25 nM and the kinetic parameters were calculated by linking the three curves. Control sensor was coated with biotinylated PD1 and 25 nM antibody was allowed to bind

[0184] FIG. 32 shows binding sensorgrams of the first set of SARS-CoV2 antibodies identified.

[0185] FIG. 33 outlines the competition assay protocol used for the first set of SARS-CoV2 antibodies identified.

[0186] FIG. 34 shows a graph of a saturation test. SA sensor loaded with S1-biotin (2.5 ug/ml, ACRO). Sensors were then dipped into wells containing a 250 nM ab solution and allowed to bind for 10 minutes. Following a short baseline in PBST, sensors were returned to the ab well to see if there was further binding. As demonstrated here, return to the ab well does not lead to additional binding, indicating that the antibodies are saturating the receptors at 250 nM.

[0187] FIG. 35 shows sensorgrams of the first set of SARS-CoV2 antibodies identified. Only the baseline followed by 2nd antibody step is shown here. Each sensor is saturated with an antibody (sensor key below) and after a short baseline is added to wells containing the 2nd competing antibody. The antibody listed on each graph is the competing antibody. The light green lines are sensors loaded with S1, but no 1st antibody (shows maximal binding). Each set also has a “self” competition control, i.e. in Ab 7, the pink line is the competition of a sensor saturated with 250 nM Ab 7, followed by competition in a well with 125 nM Ab 7. Based on these results, Ab 7 and 12 would fall into one bin and Ab2-2, 2-7, 2-10 would fall into the epitope recognized by CR3022.

[0188] FIG. 36 shows a table of the competition matrix. In the matrix, the vertical names are the 1st antibody, while the horizontal names are the 2nd/competing antibody. Boxes highlighted in red are considered blocking.

[0189] FIG. 37 shows a graph of ACE2 competition. Competition was conducted with ACE2, however protein quantity was limited and not a high enough concentration was used (only used ˜85 nM). No antibody control shows maximal ACE2 binding to S1 loaded sensors. The red line below that is CR3022, which is not reported to block ACE2 binding. All of the antibodies are below the CR3022 line with Ab 12, Ab 2-7, and Ab 2-10 being particularly flat.

[0190] FIG. 38 is a table of germline assignments for additional SARS-CoV2 antibodies identified.

[0191] FIG. 39 shows sequence alignments of additional SARS-CoV2 antibodies identified. Figure discloses SEQ ID NOS 2312-2331, respectively in order of appearance.

[0192] FIG. 40 is a table of the germline references for the additional SARS-CoV2 antibodies identified.

[0193] FIG. 41 is a table of the kinetics determined for the additional SARS-CoV2 antibodies identified. A couple of the antibodies bind RBD but not S1. Without wishing to be bound by theory, the differences in binding can be between the ACRO protein and Sino protein. All panning was done with Sino based proteins (e.g. Ab 15 and Ab 25). RBD is also smaller than S1, so loading more molecules when doing RBD loading can lead to increased signal.

[0194] FIG. 42 is a table of a competition matrix. These studies were conducted in two separate assays, SARS-CoV2 Abs 13 thru 20 were run together and SARS-CoV2 Abs 21 thru 28 were another group. Ab 2-2 was used as a surrogate for CR3022 in both assays. The 1st ab was used at 250 nM (vertical axis) and the 2nd ab was used at 125 nM (horizontal axis). Green shaded boxes are non-competing pairs and red shaded boxes are competing pairs. Shading was done manually since our antibodies have a range of binding characteristics and maximum, unblocked binding could have been below the threshold.

[0195] FIG. 43 shows a schematic of an epitope binning matrix for SARS-CoV2 antibodies.

[0196] FIG. 44 outlines the master competition with all groups for SARS-CoV2 antibodies.

[0197] FIG. 45 shows a schematic showing a table for the master binning for SARS-CoV2 antibodies 1 thru 28. Using data from the previous competition assays, a final competition assay with the 8 antibodies thought to be in separate bins was performed. Green shaded boxes are non-competing pairs, red shaded boxes are competing pairs, and the lighter green are debatable. Shading was done manually since the antibodies have a range of binding characteristics and maximum, unblocked binding could have been below the threshold. The master bins clarified that Ab 28 and Ab 2-10 are both competing for the same epitope. Other antibodies showed interesting binning characteristics. For example, Ab 12 blocks Ab 14 and Ab 19, but Ab 14 does not block Ab 19 in either direction. A more detailed epitope mapping with finer resolution will be conducted to parse out these differences.

[0198] FIG. 46 is a graph showing SARS-CoV2 pseudovirus neutralization by anti-SARS-CoV2 scFv-Fcs. 293T-ACE2 cells were used as targets for SARS-CoV-2 pseudovirus. For neutralization, scFv-Fc was mixed with pseudovirus and incubated at RT for 1 hour. scFv-Fcs were used at about 25 nM* and pseudovirus was diluted 2×. After mixing pseudovirus/ab with the cells, the plates were incubated at 37° C. for 48 hours. Cells were then lysed with Promega passive lysis buffer and Promega bioglo luciferase was added.

[0199] FIG. 47 shows antibody nucleotide sequences for SARS-CoV-2 antibodies. Figure discloses SEQ ID NOS 2332-2555, respectively in order of columns (CDR1, CDR2, CDR3, full-length sequence).

[0200] FIG. 48 shows antibody amino acid sequences for SARS-CoV-2 antibodies. Figure discloses SEQ ID NOS 2556-2779, respectively in order of columns (CDR1, CDR2, CDR3, full-length sequence).

[0201] FIG. 49 shows a schematic of a human antibody discovery through pathogenic CoV Outbreaks of SARS, MERS and SARS2.

[0202] FIG. 50 shows a schematic of the size and genetic complexity of the Mehta I & II Human scFv-Phage Display Libraries.

[0203] FIG. 51 shows ribbon diagrams for Structural Basis of Neutralization and In Vivo Protection by 80R Antibody.

[0204] FIG. 52 shows Mutant MERS-CoVs were assigned to three epitope groups. Four escape mutants were chosen for cross neutralization assay.

[0205] FIG. 53 shows kinetic analysis of selected scFv-Fc candidates from SARS-2 S1/RBD panning. Three rounds of panning for anti-SARS-2 S1/RBD antibodies was done using recombinantly expressed soluble protein. a large number of antibodies with varying kinetic properties. Antibodies highlighted in blue are suspected of binding S1 outside of the RBD.

[0206] FIG. 54 shows Epitope binning of anti-SARS-CoV Spike scFvFc's. Competitive binding assay was run to identify antibodies that bind different epitopes. Sensors were first saturated with Ab 1 (250 nM), then Ab 2 (125 nM) was added. If there was additional antibody binding as demonstrated in the top panel, the antibodies were considered to bind separate epitopes. Results from these competition assays were compiled in a matrix as seen in the middle panel. Once the antibodies were grouped into general clusters, a more detailed competition assay was performed to further differentiate the broader bins as seen in Bin 3. Based on this analysis, the antibodies fell into 3 major bins and 7 minor bins.

[0207] FIG. 55 is a graph showing Percent pseudovirus neutralization by Anti-Spike scFvFcs from Different Bins.

[0208] FIG. 56 is a graph showing FACS Staining of Anti-Spike scFvFc to SARS2 Spike-293T cells. 100 k 293T+/−SARS2 Spike cells were stained with 100 ul of scFv-Fc at 5 ug/ml. Binding was detected by anti-human Fc APC. CR3022 is full IgG. This is selected data from FIG. 74.

[0209] FIG. 57 is a graph showing a dose-response curve for monoclonal antibody Ab-12 neutralization activity against live SARS-CoV-2 virus.

[0210] FIG. 58 is a graph showing a dose-response curve for monoclonal antibody Ab-27 neutralization activity against live SARS-CoV-2 virus.

[0211] FIG. 59 is a graph showing a dose-response curve for monoclonal antibody Ab-14 neutralization activity against live SARS-CoV-2 virus.

[0212] FIG. 60 is a graph showing a dose-response curve for monoclonal antibody Ab-19 neutralization activity against live SARS-CoV-2 virus.

[0213] FIG. 61 is a graph showing a dose-response curve for monoclonal antibody Ab-28 neutralization activity against live SARS-CoV-2 virus.

[0214] FIG. 62 is a bar graph showing anti-SARS-CoV2 scFv-Fcs pseudovirus neutralization at 100 μg/ml.

[0215] FIG. 63 is a bar graph for anti-SARS-CoV2 scFv-Fc pseudovirus neutralization dilutions.

[0216] FIG. 64 is a bar graph for pseudovirus neutralization dilution curves for anti-SARS-CoV2 scFv-FCs. Ab 14=Ab 27>Ab 19>Ab 23>Ab 26>Ab 28

[0217] FIG. 65 is a schematic showing master binning for Abs 1-28.

[0218] FIG. 66 is a schematic showing ACE2 competition. The value in the box is the percent binding normalized to the unblocked sensor. Shading was done manually since our antibodies have a range of binding characteristics and maximum, unblocked binding could have been below the threshold.

[0219] FIG. 67 is a bar graph for pseudovirus neutralization of anti-SARS-CoV2 scFv-FCs.

[0220] FIG. 68 is a line graph for pseudovirus neutralization of anti-SARS-CoV2 scFv-FCs.

[0221] FIG. 69 is an epitope binning schematic. Based on competition matrix, Abs fell into 3 major bins which were further divided into 8 subbins.

[0222] FIG. 70 is a schematic of epitope binning of Abs 29-40, repeat Abs 1-8.

[0223] FIG. 71 is a schematic of epitope binning of further competition with Ab 12 group. Competition of the antibodies in the Ab 12 group leads to some interesting sub bins. Additionally, a few of the strong binders compete with Ab 12, but do not compete with ab 27 or ACE2 (i.e. Ab 35). Based upon the results here, Ab 27 competition is more correlated with ACE2 blockade compared to Ab 12 competition.

[0224] FIG. 72 is a schematic of epitope binning of further competition with CR3022 group. All Abs in the CR3022 bind have similar competition patterns. The only difference is that our Abs appear to block ACE2 whereas CR3022 does not. CR3022 is known to bind outside of the ACE2/RBD interface.

[0225] FIG. 73 is a schematic of epitope binning of further competition with S1 binding group. Abs 5, 23, 30 all bind to the S1 outside of RBD. Interestingly all of the abs appear to target the same epitope as they compete with each other. To confirm, they do not compete with ACE2, CR3022, Ab 12, or Ab 27.

[0226] FIG. 74 is a plot depicting FACS binding of scFv-FCs to 293T+/−SARS2 spike. FACS binding at single concentration (5 ug/ml) of scFv-Fc with transduced 293T-SARS2-Spike expressing cells. Cells were first gated for BFP (transduced cells) and then for antibody binding. Some of the background may be due to the inherent stickiness of scFv-Fcs. Binding was detected with anti-human-Fc APC from Biolegend.

[0227] FIG. 75 is a binding curve showing Ab-12 binding to SARS-2 spike expressing cells.

[0228] FIG. 76 is a binding curve showing Ab-12 binding to 293T cells. 293T cells were transduced with SARS-2 lentivirus. FACS was done with cells before sorting. Only BFP+ cells were used in the analysis of Ab binding. Untransduced 293T cells were used as the negative. IgG and scFv-Fc were detected by anti-human-Fc-APC and the Fab was detected by anti-His APC.

[0229] FIG. 77 are graphs of neutralization studies of the live SARS-CoV-2 virus.

[0230] FIG. 78 is a graph of neutralization studies of the live SARS-CoV-2 virus with mAb12 as an IgG or scFv-Fc.

[0231] FIG. 79 is a graph of neutralization studies of the live SARS-CoV-2 virus with mAb14 as an IgG or scFv-Fc.

[0232] FIG. 80 is a graph of neutralization studies of the live SARS-CoV-2 virus with mAb27. Note: Ab 27 IgG was actually Ab 2-2 IgG, for 27 data see FIG. 146.

[0233] FIG. 81 is a graph of neutralization studies of the live SARS-CoV-2 virus with mAb27.

[0234] FIG. 82 is a graph of neutralization studies of the live SARS-CoV-2 virus with mAb29 as an IgG or scFv-Fc.

[0235] FIG. 83 is a graph of neutralization studies of the live SARS-CoV-2 virus with mAb2-7 as an IgG or scFv-Fc.

[0236] FIG. 84 is a graph of neutralization studies of the live SARS-CoV-2 virus with mAb38 as an IgG or scFv-Fc.

[0237] FIG. 85 is a graph of neutralization studies of the live SARS-CoV-2 virus with mAb5 as an IgG or scFv-Fc.

[0238] FIG. 86 is a graph of neutralization studies of the live SARS-CoV-2 virus with PD-1 control as an IgG or scFv-Fc.

[0239] FIG. 87 shows graphs of neutralization studies of the live SARS-CoV-2 virus engineered to express luciferase. Neutralization was also tested with a mouse adapted variant of SARS-CoV-2 (Dinnon, K. H., Leist, S. R., Schafer, A. et al. A mouse-adapted model of SARS-CoV-2 to test COVID-19 countermeasures. Nature 586, 560-566 (2020). https://doi-org.ezp-prodl.hul.harvard.edu/10.1038/s41586-020-2708-8). Mixtures of various scFv-Fcs were tested: Ab 12+Ab 2-7 (mix 1), Ab 27+Ab 2-7 (mix 2), Ab 12+Ab 27 (mix 3), Ab 27+Ab 35 (mix 4), Ab 27+Ab 2-7+Ab 30 (mix 5).

[0240] FIG. 88 shows graphs of neutralization studies of the live SARS-CoV-2 virus engineered to express luciferase.

[0241] FIG. 89 shows graphs of neutralization studies of the live SARS-CoV-2 virus comparing WT and D614G mutants.

[0242] FIG. 90 shows graphs of weight loss in hamsters (TOP) and Viral load of lung tissues, 3 dpi, PFU/g (BOTTOM) of hamsters. Therapeutic treatment of Syrian golden hamsters post infection with Ab 12 IgG or Ab 2-7 scFv-Fc leads to a 513.9- and 5-fold reduction respectively compared to control treated animals. No significant difference in weight loss is observed.

[0243] FIG. 91 shows graphs of serum neutralization, day 3 post infection in hamsters. Serum was collected 3 days post infection and tested in vitro neutralization assays. Serum from Ab 12 treated animals is able to neutralize virus, whereas serum from Ab 2-7 and control treated animals is not.

[0244] FIG. 92 shows images of lung pathology studies and a graph depicting gross lesions Score, 3 dpi.

[0245] FIG. 93 shows images of lung pathology studies and a graph depicting gross lesions score, 3 dpi.

[0246] FIG. 94 are graphs showing lung lesion scores in hamsters treated with mAb 12.

[0247] FIG. 95 shows a graph a of serum neutralization study.

[0248] FIG. 96 are graphs showing lung lesion scores in hamsters treated with mAb 12.

[0249] FIG. 97 are fluorescent micrographs showing the visualization of antibody dependent enhancement SARS CoV-2.

[0250] FIG. 98 shows competition of the antibodies in the Ab 12 group. For example, a few of the strong binders compete with Ab 12, but do not compete with Ab 27 or ACE2 (i.e. Ab 35). Ab 27 competition is more correlated with ACE2 blockade compared to Ab 12 competition.

[0251] FIG. 99 shows further competition within CR3022 group. All Abs in the CR3022 bind have similar competition patterns. The only difference is that the Abs appear to block ACE2 whereas CR3022 does not. CR3022 is known to bind outside of the ACE2/RBD interface.

[0252] FIG. 100 shows further competition within S1 binding group. Abs 5, 23, 30 all bind to the S1 outside of RBD. Without wishing to be bound by theory, the antibodies target the same epitope as they compete with each other. To confirm, they do not compete with ACE2, CR3022, Ab 12, or Ab 27.

[0253] FIG. 101 is a schematic of epitope binning. Bin 1: S1, non RBD binding; Bin 2: RBD binding, competes with CR3022; Bin 3: RBD binding, non CR3022 competition.

[0254] FIG. 102 is a graph showing SARS-CoV-2 virus neutralization by scFv-Fc.

[0255] FIG. 103 shows graphs of IgG vs scFv-Fc virus neutralization. scFv-Fcs and IgGs were tested in parallel SARS-CoV-2 neutralization assays. Abs 12 and 38 showed minimal loss in neutralization efficacy, however Abs 14, 27, 29, and 2-7 displayed substantial loss. Of the 3 most potent scFv-Fcs, Ab 12 is an Ab that maintains its ability to neutralize as an IgG, while the IC50 for Ab 14 and Ab 27 shifts the right by 40- and 950-fold, respectively.

[0256] FIG. 104 shows FACS binding curves with 293T-Spike cells show a pronounced decrease in binding for Abs 14, 27, and 2-7 whereas Ab 12 shows an increase in binding. Kinetic measurements via BLI of selected Abs show that conversion from scFv to IgG does not have a significant effect on the KD values for these antibodies when binding.

[0257] FIG. 105 shows graphs of pathology scores for animals treated with PBS or anti-SARS-CoV2 Abs 12 or 2-7. *=p<0.05; ns=Not significant (Kruskall-Wallis test with Dunn's post-hoc correction)

[0258] FIG. 106 shows lung histology images. A) and B) are not depicted in this image. C) Control lung. Extensive consolidation with multiple foci of inflammatory infiltration. Magnified images (locations on low magnification images marked with numbers): (1) Airways are obstructed by inflammatory cells (combination of MNC and PMNs). (2) Airway epithelial hyperplasia notable. Perivascular cuffing and congestion prominent. D) Ab 2-7 lung. Extensive consolidation with multiple foci of inflammatory infiltration. (1) Pleuritis noted, but less severe. (2) Fewer inflammatory cells in airways, but hyperplasia of airway epithelia is still prominent. E) Ab 12 lung. Consolidation markedly reduced, with fewer and smaller foci of inflammatory infiltration. Infiltrating inflammatory cells present in some airways. (1) Pleuritis is moderate relative to control. (2) Airway epithelial hypertrophy still present.

[0259] FIG. 107 is a graph showing Spike shedding induced by scFv-Fcs. FACS based Spike shedding experiment comparing parental Abs with the BsAbs. A decrease in median fluorescence correlates to an increase in spike shedding whereas an increase in fluorescence indicates minimal shedding is observed. Antibodies that are grouped into a similar sub-bin show similar levels of shedding. Western blot image is also shown depicting the detection shed S1 in supernatant from Ab 12 IgG spike shedding experiment confirming decreasing fluorescence is a result of shedding and not internalization of the spike-Ab complex.

[0260] FIG. 108 is a cryo-EM image of Ab 5, starting at medium resolution. Without wishing to be bound by theory, Ab 5 is an anti-NTD binder.

[0261] FIG. 109 are cryo-EM images of Ab 38: 2D classification.

[0262] FIG. 110 shows cryo-EM images of Ab 12, at Medium resolution (5 Å) to begin. Without wishing to be by theory, the red arrow in the bottom figure points to a quaternary epitope: Glycan N165 from a different monomer can be involved in the epitope.

[0263] FIG. 111 shows a map refined to a nominal resolution of 2.97 Angstroms.

[0264] FIG. 112 shows a schematic of the refinement of a mixed population.

[0265] FIG. 113 shows images of cryoEM of the scFv-bound species and the map in the region of the RBD/scFv.

[0266] FIG. 114 shows images of a cryoEM map depicting three scFv molecules bound to a spike trimer, with 3-fold symmetry.

[0267] FIG. 115 shows images of a cryoEM map depicting a mixed interaction between heavy chain and light chain.

[0268] FIG. 116 shows cryoEM images of a further refined Ab2-7. Spike is blue, heavy chain is orange, light chain is gray.

[0269] FIG. 117 shows broad epitope binding for whole cell panning derived phage. Phage supernatant of unique clones were tested via ELISA against the different SARS-CoV-2 subunits (S1, S2, RBD) and against full length spikes from SARS-CoV-2 (D614G) and SARS-CoV. IL2-Fc was used as a negative control. Values shown are OD450 values, phage binding is detected with anti-M13-HRP. As shown here, a number of phage bind to the full length spike but not to any of the individually expressed domains. Without wishing to be bound by theory, this can be due to a conformational shift or junction epitope. These clones do not appear to non-specifically bind to the plates as the IL2 signal is negligible. One antibody appears to cross react between SARS1 and SARS2 and it binds the S2 domain, which generally is more conserved than the S1 domains.

### DETAILED DESCRIPTION

[0270] The present invention provides antibodies that are directed to severe acute respiratory syndrome-associated coronavirus (SARS-CoV2). In some embodiments, the antibodies described herein can neutralize infection by severe acute respiratory syndrome-associated coronavirus (SARS-CoV2). In other embodiments, the SARS-CoV2 antibodies, for example non-neutralizing antibodies, can be useful for diagnostic purposes. Specifically, anti-SARS-CoV2 Abs were isolated from a non-immune human Ab-phage library using a panning strategy.

[0271] The amino acid sequence of the monoclonal SARS-CoV2 antibodies are provided below; the amino acid sequences of the heavy and light chain complementary determining regions CDRs of the COVID-19 antibodies are underlined (CDR1), underlined and bolded (CDR2), or [symbol] [symbol] below:

TABLE 1
S1-R3-T1-H7 (Ab12) Ab Variable
Region amino acid sequences

V_{H} chain of H7
EVQLVESGPGVVSPSATLFLTCSVSGGSIRTHSWNWIRQP
PGKPLEWIGFIHHSGATNKNPSLKSRVTISSDTSKNEFSL
TLTSVTAADTAVYYCARGPGILSYWSRGTLVTVSS
(SEQ ID NO: 1)
V_{L} chain of H7
LPVLTQPPSASGTPGQRVTISCSGSSSNIGSNTVNWYQQL
PGTAPKLLIYSNNQRPSGVP.DRFSGSKSGTSASLAISGL
QSEDEADYYCAAWDDSLNVHYVFGSGTKVTVL
(SEQ ID NO: 2)

TABLE 2
RBD-R3-E1-G7 (Ab2-10) Ab Variable
Region amino acid sequences

V_{H} chain of G7
EVQLVESGPGLVKPSETLSLTCTVSGGSISSYYWSWIRQP
AGKGLEWIGRIYTSGSTNYNPSLKSRVTMSVDTSKNQFSL
KLSSVTAADTAVYYCARDVGFGWFDRWGQGTLVTVSS
(SEQ ID NO: 3)
V_{L} chain of G7
NFMLTQPHSVSESPGKTVTISCTRSSGSIASNYVQWYQQR
PGSSPTTVIYEDNQRPSGVPDRFSGSIDSSSNSASLTISG
LTTEDEADYYCQSFDSASLWVFGGGTKLTVL
(SEQ ID NO: 4)

TABLE 3
S1-RBD-R3-E1-D8 (Ab_3) Ab Variable
Region amino acid sequences

V_{H} chain of D8
EVQLVESGPGLVKPSATLFLTCSVSGGSIRTHSWNWIR*P
PGKPLEWIGFIHHSGATNKNPSLKSRVSISSDPSKNEFSL
TLTSVTAADTAVYYCARGPGILSYWSRGTLVTVSS
SEQ ID NO: 5)
V_{L} chain of D8
QPGLTQPPSASGTPGQRVTISCSGSSSNIGSNDVTWYQQL
PGTAPKLLIYSNNQRPSGVPDRFSASRSGTSASLAITGLQ
AEDEADYYCATWDDSLSAGVFGGGTKLTVL
(SEQ ID NO: 6)

TABLE 4
S1-RBD-R3-T1-C7 Ab (Ab 29) Variable
Region amino acid sequences

V_{H} chain of C7
QVQLQQSGPGLVKPSQTLSLTCAISGDSVSSYSDAWNWIR
QSPSRGLEWLGRTYYRSKWYNDYAVSVKSRITINPDTSKN
QFSLQLSSVTPEDTAVYYCAREIVATTPFRNYYYGMDVWG
QGTTVTVSS
(SEQ ID NO: 7)
V_{L} chain of C7
NFMLTQPHSVSESPGNTVTISCTRTSGSIASNYVQWYQQR
PGSSPTTVIFQDKLRPSGVPDRFSGSIDSSSNSASLTISG
LKTEDEADYYCQSYDSSSLWVFGGGTKLTVL
(SEQ ID NO: 8)

TABLE 5
RBD-R3-T1-F4 (Ab2-2) Ab Variable
Region amino acid sequences

V_{H} chain of F4
QVQLVQSGGGVVQPGRSLRLSCAASGFTFSHYDMHWVRQA
PGKGLEWLAVIGYDGTNLYYADSVKGRFTISRDKSKNTLY
LQINSLRAEDTAVYYCARAANYYDSSGYGRADAFDIWGQG
TTVTVSS
(SEQ ID NO: 9)
V_{L} chain of F4
NFMLTQPHSVSESPGKTVIISCTRTTGSIAGNYVQWYRQR
PGSAPTTVIYDDNQRPAGVPDRFSGSVDSSSNSASLTITG
LKTEDEADYYCQSYDSGNRGVFGTGTKLTVL
(SEQ ID NO: 10)

TABLE 6
RBD-R3-E1-A5 Ab (Ab_30) Variable
Region amino acid sequences

V_{H} chain of A5
QVQLVQSGGGVVQPGKSLRLSCTASGFTFSDFPIHWVRQA
PGKGLEWVGVISYDGNIKYYGDSVKGRFTISRDNAKNSLY
LQMNSLRVEDTAVYYCARGGSSFDIWGQGTTVTVSS
(SEQ ID NO: 11)
V_{L} chain of A5
SYELTQPPSVSEAPRQRVTISCSGSTSNIGNNAVSWYQHL
PGKAPKLLIYYNERLPSGVSDRFSGSKSGTSASLAISGLR
SEDEADYYCAAWDDSLSGHVVFGGGTKLTVL
(SEQ ID NO: 12)

TABLE 7
S1-RBD-R3-T1-F5 (Ab2-7) Ab Variable
Region amino acid sequences

V_{H} chain of F5
QVTLKESGPTRVKPTQTLTLTCTFSGFSLSTTGVGVGWIR
QPPGKALEWLALIYWNDDKRYSPSLKSRLTITKDTSKNQV
VLTMTNMDPVDTATYYCARISGSGYFYPFDIWGQGTTVTV
SS
SEQ ID NO: 13)
V_{L} chain of F5
NFMLTQPHSVSESPGKTVTISCTRSSGSIASNYVQWYQQR
PGSSPTTVIYEDNQRPSGVPDRFSGSIDSSSNSASLTISG
LKAEDEADYYCQSYDSSSLWVFGGGTKLTVL
(SEQ ID NO: 14)

TABLE 8
S1-R3-T1-A12 (Ab_5) Ab Variable Region
amino acid sequences

V_{H} chain of A12
QVQLVQSGGGVVQPGRSLRLSCAASGFTFTTYGMHWVRQAPGK
GLEWVAVISYDGSIKNYADFVEGRFTISRDNSKNTLYLQMNSL
RPEDTGVYYCARVGDSSSYYGIDAWGQGTLVTVSS
(SEQ ID NO: 15)
V_{L} chain of A12
QPVLTQPPSASGTPGQRVTISCSGSSSNIGSNSVNWYQQLPGT
APKLLIYSNNQRPSGVPDRFSDSKSGTSASLAISGLQSEDEAD
YFCAAWDDSLTGYVFGTGTKVTVL
(SEQ ID NO: 16)

TABLE 9
S1-R3-T1-A6 (Ab_4) Ab Variable
Region amino acid sequences

V_{H} chain of A6
QVQLVQSGGGLVQPGRSLRLSCAASGFTFSSHAMHWVRQAPGKG
LEWVAAISYDGSYTPYADSVKGRFTISRDNAKNSLYLQMNSLRD
EDTAVYYCARDWVNFGMDVWGQGTLVTVSS
(SEQ ID NO: 17)
V_{L} chain of A6
QSVLTQPPSASGSPGQSVTISCTGTSSDVGGYNYVSWYQQYPGK
APKLMIYEVSKRPSGVPDRFSGSKSGNTASLTVSGLRAEDEADY
YCAAWDDSLSGPVFGGGTKLTVL
(SEQ ID NO: 18)

TABLE 10
S1-RBD-R3-T1-A5 Ab (Ab_33) Variable
Region amino acid sequences

V_{H} chain of T1-A5
QVQLVQSGAEVKKPGASVKFSCKASGYTFSDYYIHWVRQAPGQ
GLEWMGWIDPNSGGTNFAQRFQGRVTMTTDTSVSTAYMDLRRL
RSDDTAVYYCARDRGRGGQAGAFDYWGQGTLVTVSS
(SEQ ID NO: 19)
V_{L} chain of T1-A5
QPGLTQPPSVSVAPGKTARITCGGNKIGSKSVHWYQQKAGQAP
VLVVYDDSDRPSEIPERFSGSNSGNTATLTISRAEVGDEADYY
CHVWDSSSDQNVFGTGTKVTVL
(SEQ ID NO: 20)

TABLE 11
S1-RBD-R3-T1-B3 (Ab_1) Ab Variable
Region amino acid sequences

V_{H} chain of B3
QVHLVQSGGGVVQPGRSLRLSCAASGFTFSSYAMHWVRQAPGKG
LEWVALISYGGSNKYYAESVKGRFTISRDNSKNTLYLQMNSLRA
EDTAVYYCAKVRGSGWYWGSAFDIWGQGTMVTVSS
(SEQ ID NO: 21)
V_{L} chain of B3
SSELTQDPAVSVVLGQAVRITCQGDSLRAYFAGWYQQKPGQAPV
LVTYGQDKRPSGIPDRFSASTSGNTASLTITGAQADDEADYYCN
SRDSGENHLIFGGGTKLTVL
(SEQ ID NO: 22)

TABLE 12
S1-RBD-R3-T1-E7 Ab Variable
Region amino acid sequences

V_{H} chain of E7
QVQLVQSGTEVKKPGASVKVSCKASGYSFTGSHLHWVRQAPG
QGLEWMGWINPDSGVINYAQKFQGRVTLTRDTSISTAYMELS
GLRSDDTAVYYCARDKAIGYVWALDYWGQGTLVTVSS
(SEQ ID NO: 23)
V_{L} chain of E7
QSALTQPPSVSGSPGQSVTISCTGTSSDVGTYNRVSWYQQPP
GKAPKLMIYEVSNRPSGVSNRFSGSKSGNTASLTISGLQAED
EADYYCSSYTRTFTYVFGTGTKVTVL
(SEQ ID NO: 24)

TABLE 13
S1-RBD-R3-T1-F9 Ab (Ab_39) Variable
Region amino acid sequences

V_{H} chain of F9
QVTLKESGPTLVKPTQTLTLTCTLSGVSLDTIGMRVSWIRQPPG
KALEWLARIDWDDDKFYSTALKTRLTISKDTSKNQVVFTMTSMD
PVDTATYYCARSGLLYDLDVWGRGTLVTVSS
(SEQ ID NO: 25)
V_{L} chain of F9
QSVVTQPPSVSGAPGQRVTISCTGSDSDIGANFVQWYQQLPGTA
PKLLIWRNTNRPSGVPDRFSASKSGTSASLAITGLQAEDEADYF
CQSYDSSLSAYVFGGGTKVTVL
(SEQ ID NO: 26)

TABLE 14
S1-R3-T1-C2 (Ab_6) Ab Variable Region
amino acid sequences

V_{H} chain of C2
QVQLVQSGGGVVQPGRSLRLSCAASGFTFSDYPFHWVRQAPGK
GLQWVAVTSYDGRIKLYADSVKGRFTISRDDSQNMLYLEMHSL
RLEDTAVYYCARDPGWLRSVGMDVWGQGTTVTVSS
SEQ ID NO: 27)
V_{L} chain of C2
NFMLTQPHSVSESPGKTVTISCTRSSGSIARNYVQWYQQRPGSS
PTTVIYADRDRPSGVPDRFSGSIDSSSNSASLTISGLKPEDEAD
YYCQSYDSSNQAAVFGGGTQLTVL
(SEQ ID NO: 28)

TABLE 15
RBD-R3-E1-B3 Ab (Ab_32) Variable
Region amino acid sequences

V_{H} chain of E1-B3
QVQLVQSGAEVKKPGESLKISCKGSGYSFTSYWIGWVRQMPGK
GLEWMGIIYPGDSDTRYSPSFQGQVTISADKSISTAYLQWSSL
KASDTAMYYCARGWQWHDYWGQGTLVTVSS
(SEQ ID NO: 29)
V_{L} chain of E1-B3
QTVVTQEPAVSVALGQTVRITCQGDSLRSYYASWYQQKPGQAP
VLVVYDKDKRPSGIPDRFSGSTSGNTASLTITGAQAEDEADYY
CNSRDRSDNHVVFGGGTKLTVL
(SEQ ID NO: 30)

TABLE 16
RBD-R3-T1-B5 Ab Variable Region
amino acid sequences

V_{H} chain of B5
QVQL=QSGPGLVKASQTLSLTCVISGDSVSSRSSAWSWIRQSPS
RGLEWLARTYYRSNWNYDFAQSVRSRIVINPDTSKNHVYLQLRS
VTPEDTAVYYCVRNMRPDFDLWGQGTLVTVSS
(SEQ ID NO: 31)
V_{L} chain of B5
EIVLTQSPATLSLSPGERATLSCRASQSVSNNLAWYQQRPGQAP
RLLIYDATTRATAIPARFSGSGSGTEFTLTISRLEPEDFATYYC
QQYDNLPVFGGGTKVEIN
(SEQ ID NO: 32)

TABLE 17
RBD-R3-T1-H3 (Ab_2) Ab Variable
Region amino acid sequences

V_{H} chain of H3
EVQLVQSGAEVKKPGSSVKVSCKTSGYTFTTSGISWVRQAPGQ
GLEWMGWISAYNGNTNYAQKLQGRVTMTTDTSTSTAYMELRSL
RSDDTAVYYCARDFHLYYGMDVWGKGTLVTVSS
(SEQ ID NO: 33)
V_{L} chain of H3
QSALTQPPSASGSPGQSVTISCTGTSSDVGAYNYVSWYQQHPG
KAPKLLIYDVTKRPPGVPDRFSGSKSGNTASLTVSGLQAEDEA
DYYCAVWDDGLNGRVVFGGGTKLTVL
(SEQ ID NO: 34)

TABLE 18
S1-R3-T1-C4 (Ab_8) Ab Variable Region
amino acid sequences

V_{H} chain of C4
QVQLVQSGAEVKKPGSSVKVSCKASGGTFSSYAISWLRQAPGQG
LEWMGWINPNSGGTNYAQKFQGRVTMTRDTSISTAYMELSRLRS
DDTAVYYCARGSGGYYLGWGQGTLVTVSS
(SEQ ID NO: 35)
V_{L} chain of C4
QPGLTQPPSVSKGLRQTATLTCTGNSNNVGNQGAAWLQQHQGHP
PKLLSYMNNNRPPGISERFSASRSGNTASLTITGLQPEDEADYY
CSAWDSSLSRWVFGGGTKLSV_{L} (SEQ ID NO: 36)

TABLE 19
S1-RBD-R3-T1-B12 Ab (Ab_31) Variable Region
amino acid sequences

V_{H} chain of B12
QVQLVQSGAEVKKPGSSVKVSCKASGGTFSSYTISWVRQAPGQ
GLEWMGGIIPILGTPNYAQKFQDRVAITADKSTSTAYMELSSL
RSEDTAVYYCAVGSGWYSGFDYWGQGTLVTVSS
(SEQ ID NO: 37)
V_{L} chain of B12
NFMLTQPHSVSESPGKTVTISCTGSSGSIASNYVQWYQQRPGS
APTTVIYEDSQRPSGVPDRFSGSIDSSSNSASLTISGLKTEDE
ADYYCQSFHNSNPVTFGGGTKLTVL
(SEQ ID NO: 38)

TABLE 20
S1-RBD-R3-T1-G5 Ab Variable Region
amino acid sequences

V_{H} chain of G5
QVQLVQSGGGLVQPGGSLRLSCAASGFTFSSYWMSWVRQAPG
KGLEWVANIKQDGSEKYYVDSVKGRFTISRDNAKNSLYLQMN
SLRAEDTAVYYCARGFYYYGAFDIWGQGTTVTVSS
(SEQ ID NO: 39)
V_{L} chain of G5
NFMLTQPHSVSESPGKTVTISCTGSSGSIASNYVQWYQQRPG
SAPTTVIYEDNQRPSGVPDRFSGSIGSSSNSASLTISGLKTE
DEADYYCQSYDSSNHWVFGGGTKLTVL
(SEQ ID NO: 40)

TABLE 21
S1-RBD-R3-T1-E2 (Ab7) Ab Variable Region
amino acid sequences

V_{H} chain of E2
QVQLVQSGGGLVQPGRSLRLSCAASGFTFDDYAMHWVRQVPGKG
LEWVSGIDWNSGVIGYADSVKGRFTISRDNAKNSLYLQMNSLRA
EDTALYYCAKDAYSYGFLGAFDIWGQGTMVTVSS
SEQ ID NO: 41)
V_{L} chain of E2
QPGLTQPPSVSVAPGQTARISCGGNNIGSKSVHWYQQKPGRAPV
LVVYEDRGRPSGIPERFSGSNSGNTATLTVSRVEAGDEADYYCQ
VWDGDSDHYVFATGTKVSIL
SEQ ID NO: 42)

TABLE 22
RBD-R3-T1-F7 Ab Variable Region amino
acid sequences

V_{H} chain of F7
QVQLVQSGGGLVQPGRSLRLSCAASGFTFDDYAMHWVRQVPGKGL
EWVSGIDWNSGVIGYADSVKGRFTISRDNVKNSLYLQMTSLRAED
TAVYFCARDILPSNFDGKKIIVFQPPAKRDLDNYYGMDVWGQGTT
VTVSS
SEQ ID NO: 43)
V_{L} chain of F7
QPGLTQPASVSGSPGQSVTISCTGTSSDVGGYNLVSWYQQHPGKA
PKLMIYEGSKRPSGISNRFSGSKSGNTASLTISGLQAEDEADYFC
SSYTITDVVVFGGGTKLTVL
SEQ ID NO: 44)

TABLE 23
S1-RBD-R3-T1-G1 Ab (Ab_35) Variable Region
amino acid sequences

V_{H} chain of G1
EVQLVQSGAEVKKPGESLRISCKASGYSFTSNWIGWVRQMPGKGLEWM
GSIFPGDSDTKYSPSFQGQVTISADRSISTAYLQWSGLKASDTAMYYC
ARESYNAYGSWGQGTLVTVSS
(SEQ ID NO: 47)
V_{L} chain of G1
QPGLTQPPSASGTPGQRVTISCSGSSSNIGSNPVNWYQQLPGTAPKLLI
YSNNQRPSGVPDRFSGSKSGTSASLAISGLRSEDEADYYCAAWDDSLSG
VVFGGGTKLTVL
(SEQ ID NO: 48)

TABLE 24
S1-RBD-R3-T1-C2 Ab Variable Region amino
acid sequences

V_{H} chain of RBD-R3-T1-C2
EVQLVQSGAEVKKPGASVKVSCKASGYTFTSYGISWVRQAPGQGLEWM
GWISAYNGNTKYAQKLQGRVTMTTDTSTSTAYMELRSLRSDDTAVYYC
ARGFPQLGSDYWGQGTLVTVSS
(SEQ ID NO: 49)
V_{L} chain of RBD-R3-T1-C2
QPVLTQPHSVSESPGKTVTISCTRSSGSIASNYVQWYQQRPGSAPTTV
IYEDNQRPSGVPDRFSGSIDSSSNSASLIISGLMTEDEADYYCQSYDS
TNWVFGGGTKLTVL
(SEQ ID NO: 50)

TABLE 25
S1-RBD-R3-T1-H8 Ab Variable Region amino
acid sequences

V_{H} chain of RBD-R3-T1-H8
EVQLVQSGAEVEKPGSSVKVSCKASGGTFSSYAISWVRQAPGQGLEWM
GWISGYNGNTRYAQKFQGRVTLTIDTSSSTAYMELSSLRSEDTAVYYC
ARQMKDSGNYWEYYYYGMDVWGQGTMVTVSS
SEQ ID NO: 51)
V_{L} chain of RBD-R3-T1-H8
QPGLTQPPSVSVAPGQTATITCGGDNIGSESVHWYQQKAGQAPVLVVY
EDRGRPSGIPERFSGSNSGNTATLTISRVEAGDEADYYCQVWNPSGSL
QYVFGPGTRLSV_{L} (SEQ ID NO: 52)

TABLE 26
S1-RBD-R3-E1-E8 Ab (Ab 37) Variable Region
amino acid sequences

V_{H} chain of RBD-R3-E1-E8
QVQLVQSGAEVKKPGASVKVSCKASGYTFTSYGISWVRQAPGQGLE
WMGWISTYNGNTNYAQKLQGRVTMTTDTSTSTAYMEVRSLRSDDTA
VYYCARDVFGHFDYWGQGTLVTVSS
(SEQ ID NO: 53)
V_{L} chain of RBD-R3-E1-E8
NFMLTQPHSVSESPGKTVLISCTRSSGNIATNYVQWYQQRPGSAPT
TVIYEDNQRPSGVPDRFSGSIDSSSNSASLTISGLKTEDEADYYCK
SYDDGNHVFGGGTKLTVL
(SEQ ID NO: 54)

TABLE 27
RBD-R3-T1-H2 Ab Variable Region amino
acid sequences

V_{H} chain of RBD-R3-T1-H2
QVTLKESGPTLVKPTQTLTLTCTFSGFSLTTTGVSVGWIRQPPGKA
LEWLALIHWDDDKRYSPSLRSRLTITRDTSKNQVVLTVTDMDPADT
GTYYCASFIMTVYAEYFEDWGQGTLVTVSS
(SEQ ID NO: 55)
V_{L} chain of RBD-R3-T1-H2
EIVLTQSPATLSVSPGERATLSCRASQSVSSNLPWYQQKPGQAPRL
LMYDVSTRATGIPPRFSGSGSGTEFSLTISSLQSEDFAVYYCQQRG
VWPLTFDGGTNVEIK
(SEQ ID NO: 56)

TABLE 28
S1-RBD-R3-T1-B7 Ab Variable Region amino
acid sequences

V_{H} chain of RBD-R3-T1-B7
QVTLKESGPALVKSTQTLTLTCTISGFSLSTSAMCVSWIRQSPGKA
LEWLALIDWDNDRYYTTSLKTRLTITKDTSKNQVVLTMTSMDPLDT
ATYYCAHSPYDSIWGSFRPSVYYFDYWGQGTLVTVSS
(SEQ ID NO: 57)
V_{L} chain of RBD-R3-T1-B7
NFMLTQPHSVSESPGKTITISCTRTSGSIVSSYVQWYQQRPGSFPI
TVIYEHNQRPSGVPYRFSGSIDRSSNSAALTISDLKTEDEADYYCQ
SYDSQNGVFGGGTKLTVL
(SEQ ID NO: 58)

TABLE 29
S1-RBD-R3-E1-E5 Ab Variable Region amino
acid sequences

V_{H} chain of RBD-R3-E1-E5
QVQLVQSGGGLVKPGGSLRLSCAASGFTFSDYYMTWFRQAPGKGLE
WISYISSSSSDTKYADSVKGRFTISRDNAKNSLYLQMDSLRAEDTA
VYYCAMPTREPAYWGQGTLVTVSS
(SEQ ID NO: 59)
V_{L} chain of RBD-R3-E1-E5
QSALTQPASVSGSPGQSITISCTGTSSDLGTYNYVSWYQQHPGKAP
KLMIYDVFKRPSGVPDRFSGSKSGNTASLTISGLQAEDEADYYCSS
YTSSSTYVFGTGTKVTVL
(SEQ ID NO: 60)

TABLE 30
S1-R3-T1-H6 Ab (Ab_40) Variable Region
amino acid sequences

V_{H} chain of RBD-R3-T1-H6
QVQLVQSGGGVVQPGKSLRLSCAASGFAFSDFPVHWVRQAPGKGL
EWVAVISYDGSLKYYADSVKGRFTLSRDNSKNTVYLQLSSLRRED
TAVYYCAREGVSNSRPFDHWGHGTLVTVSS
(SEQ ID NO: 61)
V_{L} chain of RBD-R3-T1-H6
SYELTQPPSVSVAPGQTARITCGGDSIGTKSVHWYQQKSGQAPVL
VVYDDDDRPSGIPERFSGSNSGNTATLTISRVEAGDEADYYCQVW
ESDDDDLVFGGGTKLTVL
(SEQ ID NO: 62)

TABLE 31
S1-RBD-R3-E1-C6 Ab Variable Region amino
acid sequences

V_{H} chain of RBD-R3-E1-C6
QVQLVQSGGGVVQPGRSLRLSCAASGFTFSSYAMHWVRQAPGKGLEYV
SAISSNGGSTYYADSVKGRFTISRDNGKNSLYLQMSSLRAEDTAVYYC
TRDLWSGSADSFDIWGQGTMVTVSS
(SEQ ID NO: 63)
V_{L} chain of RBD-R3-E1-C6
SSELTQDPAVSVALGQTVKITCQGDSLRRYYASWYQQKPGQAPVRVI
YGKNNRPSGIPDRFSGSSSGNTASLTITGAQAEDEADYYCNSRDISD
NQWQWIFGGGTKLAVL
SEQ ID NO: 64)

TABLE 32
S1-RBD-R3-E1-F2 Ab Variable Region amino
acid sequences

V_{H} chain of RBD-R3-E1-F2
QVQLVQSGGGLVQPGGSLRLSCAASGFPFNAYYMSWVRQAPGKGLEWVAN
INQDGSEKYYVDSVKGRFTISRDNAKNSLYLQMNGLRAEDTAVYYCARLY
WWGMDVWGQGTTVTVSS
(SEQ ID NO: 65)
V_{L} chain of RBD-R3-E1-F2
QSALTQPPSASGSPGQSLTISCTGTSSDVGGYKYVSWYQHHPDKAPKLLI
YDVNNRPSGVSSRFSGSKSGNTASLTISGLQAEDEADYYCSSYTGRMNLY
VFGTGTEVTPR
SEQ ID NO: 66)

TABLE 33
S1-RBD-R3-T1-C3 Ab Variable Region amino
acid sequences

V_{H} chain of RBD-R3-T1-C3
QVQLVQSGGGLVQPGRSLRLSCAASGFTFDDYAMHWVRQVPGKGLEWVS
GIDWNSGVIGYADSVKGRFTISRDNAKNSLYLQMNSLRAEDTALYYCAK
DAYSYGFLGAFDIWGQGTMVTVSS
(SEQ ID NO: 67)
V_{L} chain of RBD-R3-T1-C3
LPVLTQPPSVSVAPGQTASITCGGDNIRTKGVHWYQQKPGQAPLLVIYYA
SDRPSGIPERFSGSSSGNTATLTISRVEAGDEADYYCQVWDSSSDLVVFG
GGTTLTVL
(SEQ ID NO: 68)

TABLE 34
S1-RBD-R3-T1-G12 Ab Variable Region amino
acid sequences

V_{H} chain of RBD-R3-T1-G12
QVQLVQSGGGLVQPGGSLRLSCATSGFTFDDYAMHWVRQAPGKGLEWVS
GISWNSGSIGYVDSVKGRFTISRDNRNNKVYLQMNNLRAEDTAVYYCAR
DWWGSIDHWGLGTLVTVSS
(SEQ ID NO: 69)
V_{L} chain of RBD-R3-T1-G12
QSALTQPRSVSGSPGQSVTISCTGTSSDVGGYDYVSWYQQHPGKAPKLI
IYDVSKRPSGVPDRFSGSKSGNTASLTVSGLQAEDEADYYCSSYTSSSP
VVFGGGTKLTVL
(SEQ ID NO: 70)

TABLE 35
S1-RBD-R3-E1-F1 Ab Variable Region amino
acid sequences

V_{H} chain of RBD-R3-E1-F1
EVQLVESGPGLVKPSGTLSLTCAVSGGSISSSNWWSWVRQPPGKGLEWI
GEIYHSGSTNYNPSLKSRVTISVDTSKNQFSLKLSSVTAADTAVYYCAR
RGGTYHRGAFDIWGQGTMVTVSS
(SEQ ID NO: 72)
V_{L} chain of RBD-R3-E1-F1
QSVLTQPPSASGSPGQSVTISCTGTSRDVGSYDLVSWYQQHPGKAPKLM
IYEGSRRPSGVSSRFSGSKSGNTASLTISGLQAEDEADYYCSSYTSSNS
LVFGTGTKVTVL
(SEQ ID NO: 71)

TABLE 36
S1-RBD-R3-E1-H8 Ab Variable Region amino
acid sequences

V_{H} chain of RBD-R3-E1-H8
QVTLKESGPGLVNPSETLSLTCTVSGASISNSFWSWIRQSPGKGLEWIGY
TSYSGNSIYNPSLKSRLTMSIDTSKNQLSLNLRSLTAADTAVYYCARREW
IKGHFDYWGQGTLVTVSS
(SEQ ID NO: 73)
V_{L} chain of RBD-R3-E1-H8
NFMLTQPHSVSESPGKTVTISCTGSGGSIASNYVQWYQQRPGSAPTTVIY
EDNQRPSGVPDRFSGSIDSSSNSASLTISGLKTEDEADYYCQSYDSSNPV
VFGGGTKLTVL
(SEQ ID NO: 74)

TABLE 37
S1-RBD-R3-T1-F1 Ab Variable Region amino
acid sequences

V_{H} chain of RBD-R3-T1-F1
EVQLVESGPGLMKPSETLFLSCSVSGGSFTTHSWNWIRQTPGKPLEWMG
IILPGGATNKNPPLLSRVSISSDPSNNEFSLTLTSVTAADTAVYYCARG
PGILSYWSGGTLATVSS
(SEQ ID NO: 75)
V_{L} chain of RBD-R3-T1-F1
QPGLTQTPSPSGTPGQRVTISCSGSSSIGSNDVTWYQQLPGTAPKLLIY
SNNQRPSGVPDRFSASRSGTSPSLAITGLQAEDEADYYCAWDDSLSAVV
FGGGTKMTVL
(SEQ ID NO: 76)

TABLE 38
S1-R3-T1-B10 Ab Variable Region amino acid sequences

V_{H} chain of R3-T1-B10
EVQLVESGPGLVSPSATLFLTCSVSGGSFRTHSWNWIRQAPGKPLEWMGVIHHSGA
TNKNPSLKSRVTISSETSDNKFSLTLTSVTAEDTAVYYC [symbol] WSRGTLGTV
SS
(SEQ ID NO: 77)
V_{L} chain of R3-T1-B10
LPVLTQPPSASGTPGQRVTISCSGSSSNIGSNTVNWYHQLPRTAPKLLIYINNHRPSG
VPDRFSGS*SGTSASLAITVIQSEDEADYYC [symbol] FGSGTKVTVL
(SEQ ID NO: 78)

TABLE 39
RBD-R3-E1-D12 Ab Variable Region amino acid sequences

V_{H} chain of RBD-R3-E1-D12
EVQLVESGPGVVSPSATLFLTCSVSGGSIRTHSWNWIRQPPGKPLEWIGVIHHSGAT
NKNPSLKSRVTISSKTSDNKFSLTLTSVTAEDTAVYYC [symbol] WSRGTLGTVS
S
(SEQ ID NO: 79)
V_{L} chain of RBD-R3-E1-D12
LPVLTQPPSASGTPGQRVTISCSGSSSNIGSNTVNWYHYLPRTAPKLLIYINNHRASR
VPDRFSGS*SGTSASLAITVIQSEDEADYYC [symbol] FGSGTKVTVL
(SEQ ID NO: 80)

TABLE 40
RBD-R3-T1-C5 Ab Variable Region amino acid sequences

V_{H} chain of RBD-R3-T1-C5
EVQLVESGPGVVSPSATLFLTCSVSGGSIRTHSWNWIRQAPGKALEWIGFIHHSGAT
NNNPSLKSRVTISSDTSKNEFSLTLTSVTAADTAVYYC [symbol] WSRGTLV
TVSS
(SEQ ID NO: 81)
V_{L} chain of RBD-R3-T1-C5
LPVLTQPPSASGTPGQRVTISCSGSSSNIGSNTVNWYQQLPGTAPKLLIYSNNQRPSR
VPDRFSGSKTGTSPSLAISVLQSEDEADYYC [symbol] FGSGTKSPSY
(SEQ ID NO: 82)

TABLE 41
S1-RBD-R3-T1-B4 Ab Variable Region amino acid sequences

V_{H} chain of RBD-R3-T1-B4
QVQLVQSGAEVKKPGESLKISCKGSGYSFTSYWIGWVRQMPGKGLEWMGIIYPGD
SDTRYSPSFQGQVTISADKSISTAYLQWSSLKASDTAMYYC [symbol] WGQ
GTMVTVSS
(SEQ ID NO: 83)
V_{L} chain of RBD-R3-T1-B4
QPVLTQPPSASGTPGQRVTISCSGSSSNIGSNPVNWYQQLPGTAPKLLIYNNNQRPS
GVPDRFSGSKSGTSASLAISGLQSEDEADYYC [symbol] FGGGTKLTVL
(SEQ ID NO: 84)

TABLE 42
S1-RBD-R3-E1-E7 Ab Variable Region amino acid sequences

V_{H} chain of RBD-R3-E1-E7
QVQLVQSGAEVKKPGNSLKISCKGSRYSFSNYWIAWVRQMPGKGLEWLGSIYPYD
SDTRYSPSLQGQVTISVDKSLSTAYLQWRSLKASDTAMYYCA [symbol] WGQ
GTTVTVSS
(SEQ ID NO: 85)
V_{L} chain of RBD-R3-E1-E7
SSELTQDPAVSVALGQTVRITCQGDSLRSYYASWYQQKPGQAPVLVIYGKNNRPS
GIPDRFSGSSSGNTASLTITGAQAEDEADYYC [symbol] FGGGTKLTVL
(SEQ ID NO: 86)

TABLE 43
S1-RBD-R3-T1-C8 Ab Variable Region amino acid sequences

V_{H} chain of RBD-R3-T1-C8
EVQLVQSGAEVKKPGESLKISCKGSGYSFTSYWIGWVRQMPGKGLEWMGIIYPGD
SDTRYSPSFQGQVTISADKSISTAYLQWSSLKASDTAMYYC [symbol] WGQ
GTLVTVSS
(SEQ ID NO: 87)
V_{L} chain of RBD-R3-T1-C8
QPVLTQPPSASGTPGQRVTISCSGSSSNIGSNPVNWYQQLPGTAPKLLIYDNNQRYP
GVPDRFSGSKSGTSASLAISGLRSEDEADYYC [symbol] FGGGTKLTVL
(SEQ ID NO: 88)

TABLE 44
S1-RBD-R3-T1-D7 Ab (Ab_34) Variable Region amino acid
sequences

V_{H} chain of RBD-R3-T1-D7
QVQLVQSGVEVKKPGESLKISCKGSGYSFTSYWIGWVRQMPGKGLEWMGIIYPGD
SDTRYSPSFQGQVTISADKSISTAYLQWSSLKASDTAMYYC [symbol] WGQ
GTLVTVSS
(SEQ ID NO: 89)
V_{L} chain of RBD-R3-T1-D7
QPGLTQPPSASGTPGQGVTISCSGSSSNIGGNSVHWYQQLPGTAPKLLIYRNNQRPS
GVPDRFSGSKSGTSASLAISGLRSEDEADYYC [symbol] FGGGTKLTVL
(SEQ ID NO: 90)

TABLE 45
RBD-R3-E1-F5 Ab (Ab_36) Variable Region amino acid
sequences

V_{H} chain of RBD-R3-E1-F5
QVQLQQSGPGLVKPSQTLSLTCAIFGDSVTSNSAAWNWIRQSPSRGLEWLGRTYYS
SKWYNDYAVSVKSRVTINADTSKNQLSLQLNSVTPEDTAVYYC [symbol]
WGQGTLVTVSS
(SEQ ID NO: 91)
V_{L} chain of RBD-R3-E1-F5
NFMLTQPHSVSESPGKTVTISCTGSSGSIASNYVQWLQQRLGSAPTTVIYEDNQRPS
GVPDRFSGSIDSSSNSASLTISGLKTEDEADYYC [symbol] FGGGTKLTVL
(SEQ ID NO: 92)

TABLE 46
Ab_13 Variable Region amino acid sequences

VH chain of Ab_13
QVTLKESGPKLVKPTQTLTLTCTFSGFSLSTSGVGVGWIRQPPGKALEWLALIYWD
DDKRYSPSLKSRLTIAKDTSKYQVVLTMTNMDPVDTATYYC [symbol] W
GQGTMVTVSA
(SEQ ID NO: 722)
VL chain of Ab_13
NFMLTQPHSVSESPGKTVTISCTRSSGSIASNYVQWYQQRPGSAPTTVIYEDNQRPS
GVPDRFSGSIDSSSNSASLTISGLKTEDEADYYC [symbol] FGGGTKLTVL
(SEQ ID NO: 723)

TABLE 47
Ab_14 Variable Region amino acid sequences

V_{H} chain of Ab_14
QVQLQQSGPGLVKPSQTLSLTCAISGDSVSSNSAAWNWIRQSPARGLEWLGRTYY
RSRWYNDYAISMKSRITINPDTSKNQFSLQLESVTPEDTAVYYC [symbol] WGQ
GTLVTVSS
(SEQ ID NO: 724)
V_{L} chain of Ab_14
QSVLTQPPSASGSPGQSVTISCTGTSSDVGAYNFVSWYQHHPGKAPKLIIYDFNKRP
SGVPDRFSGSKSGNTASLTVSGLQADDEADYYC [symbol] FGGGTKLTVL
(SEQ ID NO: 725)

TABLE 48
Ab_15 Variable Region amino acid sequences

V_{H} chain of Ab_15
QVQLVQSGGGLVKPGRSLRLSCTASGFTFGDYAMSWFRQAPGKGLEWVGFIRSKA
YGGTTGYAASVKGRFTISRDDSKSIAYLQMNSLKTEDTAVYYC [symbol] WG
KGTTVTVSS
(SEQ ID NO: 726)
V_{L} chain of Ab_15
NFMLTQPHSVSESPGKTVTISCTRSSGTIASNYVQWYQQRPGSAPTTVIYEDNQRPS
GVPDRFSGSIDRSSNSASLTISGLTPDDEADYYC [symbol] FGTGTKVTVL
(SEQ ID NO: 727)

TABLE 49
Ab_16 Variable Region amino acid sequences

V_{H} chain of Ab_16
QVQLVQSGGGVVQPGRSLRLSCAASGFTFSNYGMHWVRQAPGKGLEWVALIWER
GSKKDYADSVKGRFTVSRDNSKNTLYLQMNSLRPEDTAVYFC [symbol] [symbol]
WGQGTLVTVSS
(SEQ ID NO: 728)
V_{L} chain of Ab_16
QSVLTQPPSVSGSPGQRVTMSCTGSSSNIGAGYDVHWYQQVPGAAPRLLIYGTNNR
PSGVPDRFSGSKSGTSASLTITGLQAEDEADYYC [symbol] FGTGTKVTVL
(SEQ ID NO: 729)

TABLE 50
Ab_17 Variable Region amino acid sequences

V_{H} chain of Ab_17
QVQLVQSGGGVVQPGRSLRLSCAASGFTFDDYAMHWVRQVPGKGLEWVSGIDW
NSGVIGYADSVKGRFTISRDNVKNSLYQMNSLRTEDSALYYC [symbol] [symbol]
WGQGTTVTVSS
(SEQ ID NO: 730)
V_{L} chain of Ab_17
QSALTQPASVSGSPGQSITISCTGTSSDVGGSKYVSWYQQHPGKAPKVMIYDVTKR
PSGVPDRFSGSKSGNTASLTISGLQAEDEADYYC [symbol] FGGGTKLTVL
(SEQ ID NO: 731)

TABLE 51
Ab_18 Variable Region amino acid sequences

V_{H} chain of Ab_18
EVQLVQSGGGVVQPGRSLRVSCAASGFSFSRYGMHWVRQAPGKGLEWVAFIRHD
GSKKYYADSVEGRFTISRDNSRNTVSLEMNSLRGEDTAVYYC [symbol] W
GQGTLVTVSS
(SEQ ID NO: 732)
V_{L} chain of Ab_18
NFMLTQPHSMSGSAGKTVTVSCIRSSGSIANNFVQWYQQRPGSAPTTVIYEDNQRP
SGVPDRFSGSIDSSSNSASLTISGLKTEDEADYYC [symbol] FGGGTRLTVL
(SEQ ID NO: 733)

TABLE 52
Ab_19 Variable Region amino acid sequences

V_{H} chain of Ab_19
EVQLVESGAEVKKPGESLKISCKGSGYSFTSYWIGWVRQMPGKGLEWMGIIYPGD
SDTRYSPSFQGQVTISADKSISTAYLQWSSLKASDTAMYYC [symbol] WGQG
TMVTVSS
(SEQ ID NO: 734)
V_{L} chain of Ab_19
QPGLTQPPAASGTPGQRVTVSCSGASANIGSNAVSWFKQFPETAPRLLISGNTHRPS
GVPDRVSGSKSGTSASLTISGLQSDDEADYYC [symbol] FGSGTKVTVL
(SEQ ID NO: 735)

TABLE 53
Ab 20 Variable Region amino acid sequences

V_{H} chain of Ab 20
QVQLVQSGGGSVKPGGSLRLSCAASGYRLSDYYMHWVRQA
PGKGLEWVANIKQDGSEKYYVDSVKGRFTISRDNAKNSLY
LQMNSLRAEDTAVYYCARVRGWSRGYFDYWGQGTLVTVSS
(SEQ ID NO: 736)
V_{L} chain of Ab 20
NFMLTQPHSVSESPGKTVTISCTGSSGSIASNYVQWYQQR
PGSAPTTVIYEDNQRPSGVPDRFSGSIDSSSNSASLLISG
LKTEDEADYYCQSYDSSNHWVFGGGTKLTVL
(SEQ ID NO: 737)

TABLE 54
Ab 21 Variable Region amino acid sequences

V_{H} chain of Ab 21
QVQLVQSGGGLVQPGGSLRLSCATSGFTFDDYAMHWVRQA
PGKGLEWVSGISWNSGSIGYVDSVKGRFTISRDNRNNKVY
LQMNNLRAEDTAVYYCARDWWGSIDHWGLGTLVTVSS
(SEQ ID NO: 738)
V_{L} chain of Ab 21
QSALTQPRSVSGSPGQSVTISCTGTSSDVGGYDYVSWYQQ
HPGKAPKLIIYDVSKRPSGVPDRFSGSKSGNTASLTVSGL
QAEDEADYYCSSYTSSSPVVFGGGTKLTVL
(SEQ ID NO: 739)

TABLE 55
Ab 22 Variable Region amino acid sequences

V_{H} chain of Ab 22
QVQLVQSGGGVVQPGRSLRLSCAASGFTFSHYDMHWVRQA
PGKGLEWLAVIGYDGTNLYYADSVKGRFTISRDKSKNTLY
LQINSLRAEDTAVYYCARAANYYDSSGYGRADAFDIWGQG
TTVTVSS
(SEQ ID NO: 740)
V_{L} chain of Ab 22
NFMLTQPHSVSESPGKTVIISCTRTTGSIAGNYVQWYRQR
PGSAPTTVIYDDNQRPAGVPDRFSGSVDSSSNSASLTITG
LKTEDEADYYCQSYDSGNRGVFGTGTKLTVL
(SEQ ID NO: 741)

TABLE 56
Ab 23 Variable Region amino acid sequences

V_{H} chain of Ab 23
EVQLVQSGAEVKKPGSSVKVSCRSSGGTFSTYGITWVRQA
PGQGLEWMGRIIPSLGIPNYAQKFQGRVTITADTSVSTAW
MELSSLESDDTAIYYCARENIDLATNDFWGQGTLVTVSS
(SEQ ID NO: 742)
V_{L} chain of Ab 23
QSALTQPPSASGSPGQSVTISCTGTSRDIGAYGYVSWYQQ
VPGKAPKLIIYEVRNRPSGVSSRFSGSKSGNTASLTISGL
QAEDEADYYCSSYTSSSTLDVVFGGGTKLTVL
(SEQ ID NO: 743)

TABLE 57
Ab 24 Variable Region amino acid sequences

V_{H} chain of Ab 24
QVQLVQSGAEVKTPGSSVKVSCKASGGTFSSSGVSWVRQA
PGQGLEWMGGIIPMLGTPNYAQKFQGRITITADEATSTVY
MALSSLRSEDTAMYYCARDGGNYDYWGQGTLVTVSS
(SEQ ID NO: 744)
V_{L} chain of Ab 24
QPVLTQPPSASGTPGQRVSISCSGSSSNIGRNAVDWYHQV
PGTAPQLLIYSNNERSSGVPDRFSASRSGNTASLTIIGLQ
PEDEADYYCSAWDTSLSTWVFGGGTKLTVL
SEQ ID NO: 745)

TABLE 58
Ab 25 Variable Region amino acid sequences

V_{H} chain of Ab 25
QVQLVQSGGGLVQPGGSLRLSCAASGFTFSSYWMSWVRQA
PGKGLEWVANIKQDGSEKYYVDSVKGRFTISRDNAKNSLY
LQMNSLRAEDTAVYYCARGFYYYGAFDIWGQGTTVTVSS
(SEQ ID NO: 746)
V_{L} chain of Ab 25
NFMLTQPHSVSESPGKTVTISCTGSSGSIASNYVQWYQQR
PGSAPTTVIYEDNQRPSGVPDRFSGSIGSSSNSASLTISG
LKTEDEADYYCQSYDSSNHWVFGGGTKLTVL
SEQ ID NO: 747)

TABLE 59
Ab 26 Variable Region amino acid sequences

V_{H} chain of Ab 26
QVQLVQSGGGLVQPGRSLRLSCAASGFTFDDYAMHWVRQV
PGKGLEWVSGIDWNSGVIGYADSVKGRFTISRDNAKNSLY
LQMNSLRAEDTALYYCAKDAYSYGFLGAFDIWGQGTMVTV
SS
(SEQ ID NO: 748)
V_{L} chain of Ab 26
LPVLTQPPSVSVAPGQTASITCGGDNIRTKGVHWYQQKPG
QAPLLVIYYASDRPSGIPERFSGSSSGNTATLTISRVEAG
DEADYYCQVWDSSSDLVVFGGGTTLTVL
(SEQ ID NO: 749)

TABLE 60
Ab 27 Variable Region amino acid sequences

V_{H} chain of Ab 27
QVQLVQSGTEVKKPGASVKVSCKASGYSFTGSHLHWVRQA
PGQGLEWMGWINPDSGVINYAQKFQGRVTLTRDTSISTAY
MELSGLRSDDTAVYYCARDKAIGYVWALDYWGQGTLVTVS
S
(SEQ ID NO: 750)
V_{L} chain of Ab 27
QSALTQPPSVSGSPGQSVTISCTGTSSDVGTYNRVSWYQQ
PPGKAPKLMIYEVSNRPSGVSNRFSGSKSGNTASLTISGL
QAEDEADYYCSSYTRTFTYVFGTGTKVTVL
(SEQ ID NO: 751)

TABLE 61
Ab 28 Variable Region amino acid sequences

V_{H} chain of Ab 28
QVTLKESGPGLVNPSETLSLTCTVSGASISNSFWSWIRQS
PGKGLEWIGYTSYSGNSIYNPSLKSRLTMSIDTSKNQLSL
NLRSLTAADTAVYYCARREWIKGHFDYWGQGTLVTVSS
(SEQ ID NO: 752)
V_{L} chain of Ab 28
NFMLTQPHSVSESPGKTVTISCTGSGGSIASNYVQWYQQR
PGSAPTTVIYEDNQRPSGVPDRFSGSIDSSSNSASLTISG
LKTEDEADYYCQSYDSSNPVVFGGGTKLTVL
SEQ ID NO: 753)

TABLE 62
Ab 38 Variable Region amino acid sequences

V_{H} chain of Ab 38
QVTLKESGPTLVKPTQTLTLTCTFSGFSLTTSGVSVGWIR
QPPGKALEWLALIHWDDDKRYSPSLRSRLTITRDTSKNQV
VLTVTDMDPADTGTYYCASFIMTVYAEYFEDWGQGTLVTV
SS
SEQ ID NO: 981)
V_{L} chain of Ab 38
EIVLTQSPATLSVSPGERATLSCRASQSVSSNLAWYQQKP
GQAPRLLMYDVSTRATGIPARFSGSGSGTEFSLTISSLQS
EDFAVYYCQQRGAWPLTFGGGTKVEIK
(SEQ ID NO: 982)

TABLE 65
wcS2-T4-E7 Variable Region amino acid sequences

V_{H} chain of T4-E7
EVQLVQSGGGVVQPGRSLRLSCAASGFTFSSYAMHWVRQA
PGKGLEWVAVISYDGSNKYYADSVKGRFTISRDNSKNTLY
LQMNSLRAEDTAVYYCARVNSGSYYGAFDIWGQGTTVTVS
S
SEQ ID NO: 997)
V_{L} chain of T4-E7
NFMLTQPHSVSESPGKTVTMSCTRSSGDIATRHVQWYQQR
PGSAPTTVIYESNQRPSGVSGRFSGSIDSSSNSASLTISG
LQPEDEADYYCQSYDSTNPWVFGGGTKLTVL
(SEQ ID NO: 998)

TABLE 66
wcS2-E1-A9 Variable Region amino acid sequences

V_{H} chain of El-A9
QVQLV*SGGGLVQPGRSLRLSCAASGFTFDDYAMHWVRQA
PGKGLEWVSGISWNSGSIGYADSVKGRFTISRDNAKNSLY
LQMDSLRAEDTAVYYCARDGGIQLSSFEYWGQGTLVTVSS
SEQ ID NO: 999)
V_{L} chain of El-A9
QPVLTQPPSASGSPGQSVTISCTGTSSDVGAYNYVSWYQQ
HPDKAPKLLIYEVSKRPSGVPDRFSGSKSGNTASLTVSGL
QADDEADYYCSSYAGTRKYYVFGGGTKVTVL
SEQ ID NO: 1000)

TABLE 67
wcS2-T4-H8 Variable Region amino acid sequences

V_{H} chain of T4-H8
QV*LVQSGGGVVQPGRSLRLSCAASGFTFSSYGMHWVRQA
PGKGLEWVAVISYDGSNKYYADSVKGRFTISRDNSKNTLY
LQMNSLRAEDTAVYYCARGSGSYLTDFDYWGQGTLVTVSS
(SEQ ID NO: 1001)
V_{L} chain of T4-H8
ETTLTQSPATLSLSPGERATLSCRASQIVTNNNLAWYQQK
PGQAPRLLIYGASSRATGIPDRFSGSGSGTDFTLTISRLE
PEDFAVYYCQQYYYWPLSFGGGTKVEIK
(SEQ ID NO: 1002)

TABLE 68
wcS2-T3-F5 Variable Region amino acid sequences

V_{H} chain of T3-F5
QVQLVQSGGGVVQPGRSLRLSCAASGFTFSSYAMHWVRQA
PGKGLEWVAVMSYDGSNKYYADSVKGRFTISRDNAKNSLY
LQMNSLRDEDTAVYYCARTGGYLRPIDYWGQGTLVTVSS
SEQ ID NO: 1003)
V_{L} chain of T3-F5
QPVLTQPRSVSGSPGQSVTISCTGTSSDVGGYKYVSWYQHH
PGKAPKLMIYDVSERPSGVSSRFSGSKSGNTASLTISGLQG
EDEADYFCSSFSQTNSYVFGTGTRVAVL
(SEQ ID NO: 1004)

TABLE 69
wcS2-E2-C1 Variable Region amino acid sequences

V_{H} chain of E2-C1
EVQLVQSGGGVVQPGRSLRLSCAASGFTFSSYAMHWVRQA
PGKGLEWVAVISYDGSNKYYADSVKGRFTISRDNSKNTLY
LQMNSLRAEDTAVYYCARDRSGSYWGAFDIWGQGTLVTVS
S
(SEQ ID NO: 1005)
V_{L} chain of E2-C1
QSVLTQPPSASGSPGQSVTISCTGTSSDVGRYKYVSWYQQ
HPGKAPKPMIYEVNKRPSGVPDRFSGSKSGNTASLTVSGL
QAEDEADYYCSSYAGSNNPYVFGTGTKVTVL
(SEQ ID NO: 1006)

TABLE 70
wCS2-T4-C9 Variable Region amino acid sequences

V_{H} chain of T4-C9
QVQLVQSGGGVVQPGRSLRLSCAASGFTFSSYGMHWVRQA
PGKGLEWVAVISYDGSNKYYADSVKGRFTISRDNSKNTLY
LQMNSLRAEDTAVYYCAKGRGSYSTYFDYWGQGTLVTVSS
(SEQ ID NO: 1007)
V_{L} chain of T4-C9
EIVLTQSPATLSLSPGERATLSCRASQNVPSNSLAWYQQK
PGQAPRLLINGASSRANGIPDRFSGSGSGTDFTLTITRLE
PEDFAVYFCQLYDRSSQLAFGGGTKLEIK
SEQ ID NO: 1008)

TABLE 71
wcS2-T3-B9 Variable Region amino acid sequences

V_{H} chain of T3-B9
QVQLVQSGGGVVQPGRSLRLSCAASGFTFSGYAMHWVRQA
PGKGLEWVAVVSYDGSNKYYADSVKGRFTISRDNSKNTLY
LQMNSLRAEDTAVYYCARSEGYSSGWPLDYWGQGTLVTVS
S
(SEQ ID NO: 1009)
V_{L} chain of T3-B9
SSELTQDPAVSVALGQTVRITCQGDSLGTYYASWYQQKPG
QAPLLVIYGKNNRPSGIPDRFSGSSSGNTASLTITGAQAE
DEADYYCNSRNNSGYHEFGGGTKLTVL
(SEQ ID NO: 1010)

TABLE 72
wcS2-E3-C8 Variable Region amino acid sequences

V_{H} chain of E3-C8
QV*LVQSGAEVKKPGESLKISCKGSGYNFIDYWIAWVRQL
PGQGLEWMGIIYPGDSDARYSPSFQGQVTISADKSINTAY
LQWSRLKASDTAKYYCARGYAMDVWGQGTTVTVSS
(SEQ ID NO: 1011)
V_{L} chain of E3-C8
QSVLTQPLSASGTPGHRVTISCSGSQSNIGSNTVNWYQQV
PGTAPKLLIYVNNRRPSGVPDRFSGSKSGTSAALAISGLQ
SEDEADYYCSSYAGSNDYVFGTGTKVTVL
(SEQ ID NO: 1012)

TABLE 73
wCS2-T4-F8 Variable Region amino acid sequences

V_{H} chain of T4-F8
QVELVQSGAEVKEPGASVKVSCKDSGHTFLGHYMHWVRQA
PGQGLEWMGWINPNSGVTKYAEKFQGWVTMTRDTSISTAY
MELSRLKSDDTALYYCARERTTGGAFDIWGQGTMVTVSS
(SEQ ID NO: 1013)
V_{L} chain of T4-F8
NFMLTQPHSVSESPGKTVTISCTRSSGSIASNYVQWYQQR
PGSAPTAVIFGDNQRPSGVPDRFSGSIDSSSNSASLTISG
LRTEDEADYYCQSFDGSYHWVFGGGTKLTVL
(SEQ ID NO: 1014)

TABLE 74
wcS2-T3-F1 Variable Region amino acid sequences

V_{H} chain of T3-F1
EVQLVQSGGGVVQPGRSLRLSCAASGFTFSSYAMHWVRQA
PGKGLEWVAVISYDGSNKYYADSVKGRFTISRDNSKNTLY
LQMNSLRAEDTAVYYCARDRSGSYWGAFDIWGQGTLVTVS
S
SEQ ID NO: 1015)
V_{L} chain of T3-F1
LPVLTQPPSASGTPGQRVTISCSGSSSNIGSNTVNWYQQL
PGTAPKLLIYSNNQRPSGVPDRFSGSKSGTSASLAISGLR
SEDEADYYCATWDDGLSGRVFGGGTNLAVL
(SEQ ID NO: 1016)

TABLE 75
wcS2-E2-B1 Variable Region amino acid sequences

V_{H} chain of E2-B1
QVQLVQSGGGVVQPGRSLRLSCAASGFTFSSYAMHWVRQA
PGKGLEWVAVISYDGSNKYYADSVKGRFTISRDNSKNTLY
LQMNSLRAEDTAVYYCARGDYYYYMDVWGKGTLVTVSS
(SEQ ID NO: 1017)
V_{L} chain of E2-B1
SSELTQDPAVSVALGQTVRITCQGDSLRSYYASWYQQKPG
QAPVLVIYGKNNRPSGIPDRFSGSSSGNTASLTITGAQAE
DEADYYCNSRDSSGNHLRVFGTGTKVTVL
(SEQ ID NO: 1018)

TABLE 76
wcS2-T2-G3 Variable Region amino acid sequences

V_{H} chain of T2-G3
QVQLQESGGGVVQPGRSLRLSCAASGFTFSSYAMHWVRQA
PGKGLEWVAVISYDGSNKYYADSVKGRFTISRDNSKNTLY
LQMNSLRAEDTAVYYCARGLGGGYYYGMDVWGQGTLVTVS
S
(SEQ ID NO: 1019)
V_{L} chain of T2-G3
SYELTQPPSVSQGLRQTATLTCTGNSNNVGNQGAAWLQQH
QGHPPKLLSYRNNIRPSGISERLSASTSGNTASLTITGLQ
PEDEADYYCSAWDNSLGAWVFGEGTKLTVL
(SEQ ID NO: 1020)

TABLE 77
wCS2-T1-A6 Variable Region amino acid sequences

V_{H} chain of T1-A6
QV*LVQSGAEVKKPGESLKISCKGSGYNFIDYWIAWVRQL
PGQGLEWMGIIYPGDSDARYSPSFQGQVTISADKSINTAY
LQWSRLKASDTAKYYCARG*AMDVWGQGTTVTVSS
(SEQ ID NO: 1021)
V_{L} chain of T1-A6
QSVLTQPLSASGTPGHRVTISCSGSQSNIGSNTVNWYQQV
PGTAPKLLIYVNNRRPSGVPDRFSGSKSGTSAALAISGLQ
SEDEADYYCSSYAGSNDYVFGTGTKVTVL
(SEQ ID NO: 1022)

TABLE 78
wcS2-T4-D4 Variable Region amino acid sequences

V_{H} chain of T4-D4
EV*LVQSGGGVVQPGRSLRLSCAASGFTFSSYAMHWVRQA
PGKGLEWVAVISYDGSNKYYADSVKGRFTISRDNSKNTLY
LQMNSLRAEDTAVYYCARGNRGSYYGAFDSWGQGTTATAS
S
(SEQ ID NO: 1023)
V_{L} chain of T4-D4
NFMLTHPHSVS*SPGKTATMSCTRSSGDIATRHVQWYQKR
PGSAPTTVIYESNQRPAGVSGRFSGSIDSSSNSASLTISA
VHPEDEADYYCLTYDITNPWVFGGGTNLTVL
SEQ ID NO: 1024)

TABLE 79
wcS2-T2-D10 Variable Region amino acid sequences

V_{H} chain of T2-D10
EVQLVQSGGGVVQPGRSLRLSCAASGFTFSSYAMHWVRQA
PGKGLEWVAVISYDGSNKYYADSVKGRFTISRDNSKNTLY
LQMNSLRAEDTAVYYCARDNSGSYYGAFDIWGQGTLVTVS
S
(SEQ ID NO: 1025)
V_{L} chain of T2-D10
HFVLTQPPSASESPGKTVTMSCTGTSGDIATKHDDCCHQR
PPGAPPTAMNDNDHKPSAGSADLFAAFDSASTSALIAFSV
LHADDDDDYCCSYDDSTNPCVFGAGTKVTVL
(SEQ ID NO: 1026)

TABLE 80
wcS2-T1-G9 Variable Region amino acid sequences

V_{H} chain of T1-G9
QVQLVQSGGGVVQPGRSLRLSCAASGFTFSSYGMHWVRQA
PGKGLEWVAVISYDGSNKYYADSVKGRFTISRDNSKNTLY
LQMNSLRAEDTAVYYCAKGRGSYSTYFDYWGQGTLVTVSS
(SEQ ID NO: 1027)
V_{L} chain of T1-G9
ETTLTQSPGTLSLSPGERATLSCRASQSISSSYLAWYQQK
PGQAPRLLIYDASNRAPGIPARFSGSGSGTDFTLTISSLE
PEDFAVYYCQQRGNWPLTFGPGTKVHIK
(SEQ ID NO: 1028)

TABLE 81
wcS2-E3-H7 Variable Region amino acid sequences

V_{H} chain of E3-H7
QVQLVQSGGGVVQPGRSLRLSCAASGFTFSIYGMHWVRQA
PGKGLEWVAGISYDGSNKYYADSVKGRFTISRDNSKNTLY
LQMNSLRAEDTAVYYCAKGRGSYSTYFDYWGQGTLVTVSS
(SEQ ID NO: 1029)
V_{L} chain of E3-H7
EIVLTQSPATLALSPGERATLSCRDSQNVPSNSLAWYQQR
PGQAPRLLINGASSRANGIPYRFSGSGSGTDFTLTITRLE
PEDFAVYFCQLYDRSSQLASAERTKMEIK
(SEQ ID NO: 1030)

TABLE 82
wcS2-T2-C11 Variable Region amino acid sequences

V_{H} chain of T2-C11
QVTLKESGPTLVKPTQTLTLTCTFSGFSLSTSGVGVGWIR
QPPGKALEWLALIYWDDDKRYSPSLKSRLTISKDTSRNQV
VLTMTNMDPADTGTYYCAHRRPDWDAFDVWGQGTMVTVSS
(SEQ ID NO: 1031)
V_{L} chain of T2-C11
SSELTQDPAVSVALGQTVRITCQGDSLTIFFANWYQQKPG
QAPILVMSKDTERPSGIPERFSGSSSGTRVTLTISGVQAE
DEADYYCQSADTSGTLKVFGGGTKLTVL
SEQ ID NO: 1032)

TABLE 83
SARS2-R3-G2-P1-H9_PeIB-F_2020-06-19_D08
Variable Region amino acid sequences

V_{H} chain of G2-P1-H9
QVQLVQSGGGLVKPGGSLRLSCSASGFTFSSYAMHWVRQA
PGKGLEWVAVISYDGSNKYYADSVQGRITISRDNSKNTLY
LQMNSLRAEDTAVYFCARSDGYPYEPFDYWGQGTLVTVSS
(SEQ ID NO: 1033)
V_{L} chain of G2-P1-H9
QSALTQPASVSGSPGQSITISCTGTSSDLGGHNFVSWYQQ
HPGKAPKLMIYGVNKRPSGVPDRFSGSKSGNTASLTVSGL
QAEDEADYYCSSYEATHIYVFGTGTKVAVL
(SEQ ID NO: 1034)

TABLE 84
SARS2-R3-G3-P1-F8 PeIB-F 2020-06-19_
F11 Variable Region amino acid sequences

V_{H} chain of G3-P1-F8
QVQLVQSGGGVVQPGRSLRLSCAASGFTFSSYGMHWVRQA
PGKGLEWVAVISYDGSNKYYADSVKGRFTISRDNSKNTLY
LQMNSLRAEDTAVYYCARGSGITGAFRDWGQGTLVTVSS
(SEQ ID NO: 1035)
V_{L} chain of G3-P1-F8
QSALTQPASVSGSPGQSITISCTGTSSDVGSYNLVSWYQQ
HPGKAPKLMISEVSNRPSGVSNRFSGSKSGNTASLTISGL
QAEDEADYYCSSFSSGSIPYVFGAGTKVTVL
(SEQ ID NO: 1036)

TABLE 85
SARS2-R3-G2-P1-B4_PelB-F_2020-06-19_B02
Variable Region amino acid sequences

V_{H} chain of G2-P1-B4
QVQLVQSGGGVVQPGRSLRLSCAASGFTFSSYGMHWVRQAPGKGLEW
VAVISYDGSNKYYADSVKGRFTISRDNSKNTLYLQMNSLRTEDTAVY
YC [symbol] [symbol] WGQGTLVTVSS
(SEQ ID NO: 1037)
V_{L} chain of G2-P1-B4
EIVLTQSPATLSVSPGERATLSCRASQSVSTNLAWYQQKPGQAPRLL
IYGASTRATGIPARFSGSGSGTEFTLTVSRLEPEDFAVYYC [symbol]
FGQGTRVEIR
(SEQ ID NO: 1038)

TABLE 86
SARS2-R3-G3-P1-B2_PelB-F_2020-06-19_A08
Variable Region amino acid sequences

V_{H} chain of G3-P1-B2
QVQLVQSGGGVVQPGRSLRLSCAASGFTFSSYAMHWVRQAPGKGLEW
VAVISYDGSNKYYADSVKGRFTISRDNSKNTLYLQMNSLRAEDTAVY
YC [symbol] [symbol] WGQGTTVTVSS
(SEQ ID NO: 1039)
V_{L} chain of G3-P1-B2
QSVLTQPPSASGTPGQRVTISCSGSSSNIGSNTVNWYQQLPGTAPKL
LIYSNNQRPSGVPDRFSGSKSGTSVSLAISGLQSEDEADYYC [symbol]
FGGGTNLAVL
(SEQ ID NO: 1040)

TABLE 87
SARS2-R3-G3-P1-B3_PelB-F_2020-06-19_B08
Variable Region amino acid sequences

V_{H} chain of G3-P1-B3
QVQLQESGGGVVQPGRALRLSCRASGFNFGTFGMHWVRQAPGKGLEW
VAVISYDGSNKYYADSVKGRFTISRDNSKNTLYLQMNSLRAEDTAVY
YC [symbol] [symbol] WGQGTMVTVSS
(SEQ ID NO: 1041)
V_{L} chain of G3-P1-B3
SYELTQPPSVSVAPGKTANMTCGGNNIGSKSVHWYQQKPGQAPVLVV
YDDTDRPPGIPERFSGSNSGNTATLTISRVEVGDEADYYC [symbol]
FGTGTKVTVL
(SEQ ID NO: 1042)

TABLE 88
SARS2-R3-G1-P3-E8_PelB-F_2020-06-19_H04
Variable Region amino acid sequences

V_{H} chain of G1-P3-E8
*VQLVQSGAEVKKPGSSVKVSCKASGGTFSSYAISWVRQAPGQGLEW
MGGIIPIFGTANYAQKFQGRVTITADKSTSTAYMELSSLRSEDTAVY
YC [symbol] WGQGTMVTVSS
(SEQ ID NO: 1043)
V_{L} chain of G1-P3-E8
SSELTQDPAVSVALGQTVRITCQGDSLRSYYASWYQQKPGQAPVLVI
YGGNNRPSGIPDRISGSSSGNTASLTITGAQAEDEADYYC [symbol]
FGTGTKVTVL
(SEQ ID NO: 1044)

TABLE 89
SARS2-R3-G1-P2-D7_PelB-F_2020-06-19_H09
Variable Region amino acid sequences

V_{H} chain of G1-P2-D7
EVQLVQSGAEVKKPGASVKVSCKASGYTFTSYGISWVRQAPGQGLEW
MGWISAYNGNTNYAQKLQGRVTMTTNTSTNTAYMELRSLRSDDTAGY
YW [symbol] [symbol] WGQGTTVTVSS
(SEQ ID NO: 1045)
V_{L} chain of G1-P2-D7
QSGLTQPPSVSGAPGQRVTISCTGSSSNIGAGYDVHWYQQLPGTAPK
LIIYGNSNRPSGVPDRFSGSKSGTSASLAITGLQAEDEADYYC [symbol]
FGGGTKLTVL
(SEQ ID NO: 1046)

TABLE 90
SARS2-R3-G1-P1-C6_PelB-F_2020-06-19_H02
Variable Region amino acid sequences

V_{H} chain of G1-P1-C6
QVTLKESGPTLVKPTQTLTLTCTFSGFSLSTSGVGVGWIRQPPGKALE
WLALIYWDDDKRYSPSLKSRLTITKDTSKNQVVLTMTNMDPVDTATYY
C [symbol] WGQGTLVTVSS
(SEQ ID NO: 1047)
V_{L} chain of G1-P1-C6
SYELTQPPSVSVSPGQTARITCSGDALPNRYAYWYQQRPGQAPVLVIY
KDSERPSGIPERFSGSSSGTTVTLTISGVQAEDEADYYC [symbol]
FGGGTKVTVL
(SEQ ID NO: 1048)

TABLE 91
SARS2-R3-T-P2-E12_PelB-F_2020-06-19_D07
Variable Region amino acid sequences

V_{H} chain of T-P2-E12
QVQLVQSGGGLVQPGGSLRLSCSASGFTFSSYAMHWVRQAPGKGLEW
VEVISYDGSNKYYAYSVQGRFTISKNNSKNTLYLQMNSLKAEDTAVY
FC [symbol] RGRGTPGTASS
(SEQ ID NO: 1049)
V_{L} chain of T-P2-E12
HTVLTHPAPAAAYPGQTITISCSATSSDLVGHKFVSWYQQHPGKAPT
LVIYEINNRPSGVPDRFSGSIYGNTDSLTVSAGVEDEDDYYC [symbol]
S*TGTEVAFI
(SEQ ID NO: 1050)

TABLE 92
SARS2-R3-G2-P1-D12_PelB-F_2020-06-19_
H04 Variable Region amino acid sequences

V_{H} chain of G2-P1-D12
QVQLVQSGGGVVQPGRSLRLSCAASGFIFSSYGMHWVRQAPGKGLEW
VAVISYDGSNKYYADSVKGRFTISRDNSKNTLYLQMNSLRVEDTAVY
YC [symbol] [symbol] WGQGTMVTVSS
(SEQ ID NO: 1051)
V_{L} chain of G2-P1-D12
DIVMTQTPSTLSASVGDRVTISCRASENVNNWVAWYQQKPGKVPELL
MYKASRLEPGVPSRFSGSGSGTEFTLTISNLQPEDFATYYC [symbol]
FGQGTKVDIK
(SEQ ID NO: 1052)

TABLE 93
SARS2-R3-G1-P2-E8_PelB-F_2020-06-19_E10
Variable Region amino acid sequences

V_{H} chain of G1-P2-E8
EVQLVQSGGGVVQPGRSLRLSCAASGFTFSSYAMHWVRQAPGKGLEW
VAVISYDGSNKYYADSVKGRFTISRDNSKNTLYLQMNSLRAEDTAVY
YC [symbol] [symbol] WGQGTLVTVSS
(SEQ ID NO: 1053)
V_{L} chain of G1-P2-E8
NFMLTQPHSVSESPGKTVTISCTRSSGSIASNYVQWYQQRPGSSPTA
VIYAHNQRPSEVPDRFSGSIDISSNSASLTISGLKTEDEADYYC [symbol]
FGGGTKLTVL
(SEQ ID NO: 1054)

TABLE 94
SARS2-R3-G1-P1-A10_PelB-F_2020-06-19_H01
Variable Region amino acid sequences

V_{H} chain of G1-P1-A10
EVQLVQSGGGVVQPGRSLTLSCAASGFTFSSYAMHWVRQAPGKGLEW
VAVISYDGSNKYYADSVKGRFTISRDNSKNTLYLQMNSLRAEDTAVY
YC [symbol] [symbol] WGQGTTVTVSS
(SEQ ID NO: 1055)
V_{L} chain of G1-P1-A10
ETTLTQSPGTLSLSPGERATLSCRASQSVRSNLAWYQQKPGQAPRLL
IYGVSTRATGIPARFSGSGSGTDFTLTISRLEPEDFAVYFC [symbol]
FGQGTKLEIK
(SEQ ID NO: 1056)

TABLE 95
SARS2-R3-G1-P3-B5_PelB-F_2020-06-19_D02
Variable Region amino acid sequences

V_{H} chain of G1-P3-B5
QVQLVQSGGGVVQPGRSLRLSCAASGFTFSSYGMHWVRQAPGKGLEW
VALISYDGSNKYYADSVKGRFTISRDNAKNSLYLQMNSLRAEDTAVY
YC [symbol] WGQGTLVTVSS
(SEQ ID NO: 1057)
V_{L} chain of G1-P3-B5
QSALTQPPSASGSPGQSVTISCTGTSSDVGSYNRVSWYQQPPGTAPK
LMIYEVSNRPSGVPDRFSGSKSGNTASLTISGLQAEDEADYYC [symbol]
FGTGTKVTVL
(SEQ ID NO: 1058)

TABLE 96
SARS2-R3-G3-P1-A2_PelB-F_2020-06-19_B07
Variable Region amino acid sequences

V_{H} chain of G3-P1-A2
QVQLVQSGTEVRQPGASVKVSCKASGYTFTSYGISWVRQAPGQGLEW
MGGIIPIFGTANYAQKFQGRVTITADESTSTAYMELSSLRSEDTAVY
YC [symbol] [symbol] DVWGQGTTVTVSS
(SEQ ID NO: 1059)
V_{L} chain of G3-P1-A2
NFMLTQPHSVSGSPGKTVTISCTRDIGDIARNYVQWYQQRPGSSPTT
VIYEDDRRPSGVPDRFSGSVDRSSNSASLTISGLDTEDEADYYC [symbol]
FGGGTKLTVL
(SEQ ID NO: 1060)

TABLE 97
SARS2-R3-G3-P1-D1_PelB-F_2020-06-19_G09
Variable Region amino acid sequences

V_{H} chain of G3-P1-D1
EVQLVQSGGGVVQPGRSLRLSCAASGFTFSSYAMHWVRQAPGKGLEW
VAVISYDGSNKYYADSVKGRFTISRDNSKNTLYLQMNSLRAEDTAVY
YC [symbol] WGKGTLVTVSS
(SEQ ID NO: 1061)
V_{L} chain of G3-P1-D1
QPVLTQPPSVSGAPGQSVTISCIGSSSNIGAGYHVQWYQQVPGTAPK
LLIYGNQNRPSGVPDRFSGSKSGTSASLAISGLRSEDEADYFC [symbol]
FGTGTKVNVL
(SEQ ID NO: 1062)

TABLE 98
SARS2-R3-G1-P2-D4_PelB-F_2020-06-19_G09
Variable Region amino acid sequences

V_{H} chain of G1-P2-D4
QVQLVQSGGGVVRPGRSLRLSCAASGFTFSSYALHWVRQAPGKGLEW
VAVISYDGSHKYYADSVKGRFTISRDNAKNSLYLQMNSLRAEDTAVY
YC [symbol] [symbol] WGQGTMVTVSS
(SEQ ID NO: 1063)
V_{L} chain of G1-P2-D4
QPGLTQPPSVSKDLRQTATLTCTGNSNNVGHEGAAWLQQHQGHPPKL
LSYKNDNRPSGISERFSASTSGNTASLTITGLQPEDEADYYC [symbol]
FGGGSRLTVL
(SEQ ID NO: 1064)

TABLE 99
SARS2-R3-G1-P1-B6_PelB-F_2020-06-19_E02
Variable Region amino acid sequences

V_{H} chain of G1-P1-B6
EVQLVQSGGGVVQPGRSLRLSCAASGFTFSSYAMHWVRQAPGKGLEW
VAVISYDGSNKYYADSVKGRFTISRDNSKNTLYLQMNSLRAEDTAIY
YC [symbol] [symbol] WGQGTLVTVSS
(SEQ ID NO: 1065)
V_{L} chain of G1-P1-B6
QPVLTQPPSASGTPGQRVTISCSGGRSNIGSNTVNWYQQLPGTAPKL
LIYSNNHRPSGVPDRFSGSKSGNTASLTISGLQAEDEADYYC [symbol]
FGGGTKLTVL
(SEQ ID NO: 1066)

TABLE 100
SARS2-R3-G3-P1-G8_PelB-F_2020-06-25_A05 Variable Region
amino acid sequences

V_{H} Chain of G3-P1-G8
QVTLKESGPALVKPTQTLTLTCTFSGFSLSTSGVGVGWIRQPPGKALEWLALIYWD
DDKRYSPSLKSRLTITKDTSKNQVVLTMTNMDPVDTATYYC [symbol] WG
QGTLVTVSS
(SEQ ID NO: 1067)
V_{L} chain of G3-P1-G8
QPVLTQPPSVSVSPGQTASITCSGDNLGEIYASWYQQKPGQSPVLVIYQDKKRPSGI
PERFSGSNSGNTATLTISETQAMDEADYYC [symbol] FGTGTKVTVL
(SEQ ID NO: 1068)

TABLE 101
SARS2-R3-G1-P1-F11_PelB-F_2020-06-25_B05 Variable Region
amino acid sequences

V_{H} chain of G1-P1-F11
QVTLKESGPTLVKPTQTLTLTCTLSGFSLTTSGVGVGWIRQPPGKALEWLALIYWD
DDKRYSPSLKSRLTITKDTSKNQVVLTMTNMDPVDTATYYC [symbol] W
GQGTTVTVSS
(SEQ ID NO: 1069)
V_{L} chain of G1-P1-F11
SYELTQPPSVSVSPGQTATITCSGDALPDKYAYWYRQRPGQAPVLVIYKDSERPSGI
PERFSGSSSGTTVTLTISGVQAEDEADYYC [symbol] FGGGTKLTVL
(SEQ ID NO: 1070)

TABLE 102
SARS2-R3-T1-P3-F4_PelB-F_2020-06-20_C03 Variable Region
amino acid sequences

V_{H} chain of T1-P3-F4
QVQLVQSGGGVVQPGRSRRLSCTASGITFYSYGMHWVRQAPGKGLEWVSTISNIY
NTHYADSVKGRFTISRDNSKNTLYLQMKSLRAEDTATYYC [symbol] WGQGTL
VTVSS
(SEQ ID NO: 1071)
V_{L} chain of T1-P3-F4
QSVLTQPPSASGSPGQSVTISCTGTSSDVGGYNHVSWYQQHPGKAPKVLIYDVSKR
PSGVPDRFSGSKSGNTASLTVSGLQAEDEADYYC [symbol] FGTGTEVTVL
(SEQ ID NO: 1072)

TABLE 103
SARS2-R3-G1-P2-B8_PelB-F_2020-06-25_C06 Variable Region
amino acid sequences

V_{H} chain of G1-P2-B8
QVQLVQSGGGLVQPGGSLRLSCAASGFTFSSYAMSWVRQAPGKGLEWVSAISGSG
GSTYYADSVKGRFTISRDNSKNTLYLQMNSLRAEDTGVYYC [symbol] WGQ
GTLVTVSS
(SEQ ID NO: 1073)
V_{L} chain of G1-P2-B8
QSVLTQPPSASGSPGHSVTISCTGTSGDVGGYNSVSWYQHHPGKAPKLMIYEVTKR
PSGVPDRFSGSKSGNTASLSVSGLQAEDEADYYC [symbol] FGTGTKVTVL
(SEQ ID NO: 1074)

TABLE 104
SARS2-R3-G1-P2-D3_PelB-F_2020-06-25_C12 Variable Region
amino acid sequences

V_{H} chain of G1-P2-D3
QVQLVQSGGGVVQPGRSLRLSCAASGFTFSSYAMHWVRQAPGKGLEWVAVISYD
GSNKYYADSVKGRFTISRDNSKNTLYLQMNSLRAEDTAVYYC [symbol] [symbol]
WGQGTLVTVSS
(SEQ ID NO: 1075)
V_{L} chain of G1-P2-D3
NFMLTQPHSVSESPGKTVAISCTRSSGSIASNYVQWYQQRPGSSPTTVIYEDNQRPS
GVPDRFSGSIDSSSNSASLTISGLKTEDEADYYC [symbol] FGGGTKLTVL
(SEQ ID NO: 1076)

TABLE 105
SARS2-R3-G1-P4-C5_PelB-F_2020-06-25_C07 Variable Region
amino acid sequences

V_{H} chain of G1-P4-C5
EVQLVQSGGGVVQPGRSLRLSCAASGFTFSSYGMHWVRQAPGKGLEWVSYISSSS
KYIYYADSVKGRFTISRDNAKNSLYLQMNSLRAEDTAVYYC [symbol] W
GQGTLVTVSS
(SEQ ID NO: 1077)
V_{L} chain of G1-P4-C5
LPMLTQPPSMSGTPGQRVTISCSGSSSNIGSNTVNWYQQVPGTAPKVLIYSNNQRPS
GVPDRFSGSKSGTSASLAISGLRSEDEADYSC [symbol] IGGGTKLTVL
(SEQ ID NO: 1078)

TABLE 106
SARS2-R3-G1-P2-D6_PelB-F_2020-06-25_D02 Variable Region
amino acid sequences

V_{H} chain of G1-P2-D6
QVQLVQSGAEVKKPGASVKVSCKASGYTFSSYAFSWVRQAPGQGLEWMGWISAF
NGNTDYAQNFQGRVTMTTDTSTNTAYMELRSLRSDDTAVYYC [symbol] WG
QGTLVTVSS
(SEQ ID NO: 1079)
V_{L} chain of G1-P2-D6
SYELTQPPSVSKGLRQTATLTCTGNSNNVGHEGASWLQHHQGHPPKLLSYRNKNR
PSGISERFSASRSGNTASLTITGLQPEDEADYYC [symbol] FGTGTKVTVL
(SEQ ID NO: 1080)

TABLE 107
SARS2-R3-G1-P1-B7_PelB-F 2020-06-25_A03 Variable Region
amino acid sequences

V_{H} chain of G1-P1-B7
EVQLVQSGAEVKKPGASVKVSCKASGYTFTSYYMHWVRQAPGQGLEWMGIINPS
GGSTSYAQKFQGRVTMTRDTSTSTVYMELSSLRSEDTAVYYC [symbol]
DIWGQGTTVTVSS
(SEQ ID NO: 1081)
V_{L} chain of G1-P1-B7
SYELTQPPSVSVSPGQTATITCSGDKLEDKFVSWYQQKPGHSPLLVIYEDAKRPSGIP
ERFSGSNSGNRAILTINGTQALDEADYYC [symbol] FGGGTKLAVL
(SEQ ID NO: 1082)

TABLE 108
SARS2_95_PelB-F_2020-06-25_G11 Variable Region amino
acid sequences

V_{H} chain of G11
QVQLVQSGGGVVQPGRSLRLSCAASGFTFSNYAMHWVRQAPGKGLEWVAVISYD
GSTEYYADSVKGRFTISRDNSKKMLYLQMNSLTAEDTAVYYC [symbol] [symbol]
WGQGTTVTVSS
(SEQ ID NO: 1083)
V_{L} chain of G11
ETTLTQSPGTLSLSPGERATLSCRASQSVSSTYLAWYQQKPGQAPRLLIYGASNRAT
GIPDRFSGSGSGTDFTLTISSLQPEDFATYYC [symbol] FGQGTKLEIN
(SEQ ID NO: 1084)

TABLE 109
SARS2_73_PelB-F_2020-06-25_F09 Variable Region
amino acid sequences

V_{H} chain of F09
QVQLVQSGGGLVQPGGSLRLSCAASGFTFSSYEMNWVRQAPGKGLEWVAVISYD
GSNKYYADSVKGRFTISRDNSKNTLYLQMNSLRAEDTAVYYC [symbol] WG
QGTLVTVSS
(SEQ ID NO: 1085)
V_{L} chain of F09
DIVMTQSPATLSVSPGERATLSCRASQSVRDGYLAWYQQRPGQAPRLLISGASTRA
TDIPDRFTGSGSGTDFTLTISSLEPEDFAVYY [symbol] FGQGTKVESK
(SEQ ID NO: 1086)

TABLE 110
SARS2-R3-G3-P1-G9_PelB-F_2020-06-25_B05 Variable Region
amino acid sequences

V_{H} chain of G3-P1-G9
QVQLVQSGGGLVKPGGSLRLSCAASGFTFSSYAMHWVRQAPGKGLEWVAVISYD
GSNKYYADSVKGRFTISRDNSKNTLYLQMNSLRAEDTAVYYC [symbol]
WGQGTLVTVSS
(SEQ ID NO: 1087)
V_{L} chain of G3-P1-G9
QSVLTQPPSASGSPGQSVTVSCTGTSDDVGGFAHVSWYQQHPGKAPKLLIHDVSKR
PSGVPDRFSASKSGNTASLTISGLQPEDEGDYFC [symbol] FGGGTTLTVL
(SEQ ID NO: 1088)

TABLE 111
SARS2-R3-G1-P3-G7_PelB-F_2020-06-25_H01 Variable Region
amino acid sequences

V_{H} chain of G1-P3-G7
QVQLVQSGAEVKKPGASVKVSCKASGYTFTGYYMHWVRQAPGQGLEWMGRINP
NSGGTNYAQKFQGRVTMTRDTSISTAYMELSRLRSDDTAVYYC [symbol] [symbol]
WGQGTTVTVSS
(SEQ ID NO: 1089)
V_{L} chain of G1-P3-G7
QPVLTQPPSVSKDLRQTATLTCTGNSNNVGDQGTAWLQQHQGHPPKLVSYRNNN
RPSGVSERFSASRSGNTASLTITGLQAEDEADYYC [symbol] FGGGTKLTVL
(SEQ ID NO: 1090)

TABLE 112
SARS2-R3-G1-P4-A2_PelB-F_2020-06-25_A06 Variable Region
amino acid sequences

V_{H} chain of G1-P4-A2
QVQLQQSGAEVKKPGSSVKVSCKASGSTFNNYAVSWVRQAPGQGPEWMGRIIPIV
DIANYAQRFQGRVTITADESTNTAYMELSSLRSEDTAVYYC [symbol] W
GKGTTVTVSS
(SEQ ID NO: 1091)
V_{L} chain of G1-P4-A2
NFMLTQPHSVSESPGKTVTISCTRSSGSIASNYVQWYQQRPGSAPTTVIYEDNQRPS
GVPDRFSGSIDSSSKTASLIISGLETEDEADYYC [symbol] FGGGTKLTVP
(SEQ ID NO: 1092)

TABLE 113
SARS2-R3-G3-P1-G1_PelB-F_2020-06-25_F04 Variable Region
amino acid sequences

V_{H} chain of G3-P1-G1
EVQLVQSGAEVKKPGASVKVSCKASGYTFTSYGISWVRQAPGQGLEWMGWISAY
NGNTNYAQKLQGRVTMTTDTSTSTAYMELRSLRSDDTAVYYC [symbol] [symbol]
WGQGTTVTVSS
(SEQ ID NO: 1093)
V_{L} chain of G3-P1-G1
QSVLTQPPSVSGAPGQRVTISCTGSSSNIGAGYDVHWYQQLPGTAPKLIIYGNSNRP
SGVPDRFSGSKSGTSASLAITGLQAEDEADYYC [symbol] FGGGTKLTVL
(SEQ ID NO: 1094)

TABLE 114
SARS2-R3-G3-P1-F1_PelB-F_2020-06-25_C04 Variable Region
amino acid sequences

V_{H} chain of G3-P1-F1
QVQLVQSGGGVVQPGRSLRLSCAASGFTFSSYAMHWVRQAPGKGLEWVAVISYD
GSNKYYADSVKGRFTISRDNSKNTLYLQMNSLRDEDTAVYYC [symbol] [symbol]
WGQGTLVTVSS
(SEQ ID NO: 1095)
V_{L} chain of G3-P1-F1
QSALTQPASVSGSPGQSITISCTGTSSDLGGHNFVSWYQQHPASAPKLIIYDVYNRPS
GVSNRFSGSESGDTASLTISGLRAEDEADYFC [symbol] FGTGTKVTVL
(SEQ ID NO: 1096)

TABLE 115
SARS2-R3-G1-P3-H10_PelB-F_2020_Jun. 25_H10
Variable Region amino acid sequences

V_{H} chain of G1-P3-H10
QVQLQESGAGLLRPSETLSLTCAVYGGSFSSYHWSWIRQPPGKGLEWIGE
IDHYGSPNYNPSFQSRVAMSRDTPKNQFSLKLSSVTAADTAVYYC [symbol]
WGQGTLVTVSS
(SEQ ID NO: 1097)
V_{L} chain of G1-P3-H10
LPVLTQPPSASETPGQRVTISCSGGRSNIGINSVNWYQQLPGTAPKLLIY
RNNQRPSGVPDRFFGSKSGTSASLAISGLQSEDEADYYC [symbol]
FGGGTKLTVL
(SEQ ID NO: 1098)

TABLE 116
SARS2-85_PelB-F_2020_Jun. 25_G10 Variable Region
amino acid sequences

V_{H} chain of G10
QVQLV*SGAEVKKPGESLKISCQGSGYNFNDYWVGWVRQKPGKGLEWMGI
IYPGDSDTRKNPSFEGQVTMSVDKSLHSVYLHWTSLKVSDTAKYYC [symbol]
WGQGTLGTVSS
(SEQ ID NO: 1099)
V_{L} chain of G10
QPVLTQPPSVSGAPGQSVTISCTGSSSNIGNYGVHWYQQLPGTAPKLLIY
SNNQRPSGVPDRFSGSKSGTSASLAISGLQSEDEADYYC [symbol]
FGGGTKVTVL
(SEQ ID NO: 1100)

TABLE 117
SARS2-R3-G1-P4-A3_PelB-F_2020_Jun. 25_B06 Variable
Region amino acid sequences

V_{H} chain of G1-P4-A3
QVQLVQSGAEVKKPGASVKVSCKASGYTFSNYDINWVRQATGQGLEWMGW
MNPNSGNTGYAQSFQGRVTFTRDTSINTAYMELSSLRSEDTAVYYC [symbol]
WGQGTTVTVSS
(SEQ ID NO: 1101)
V_{L} chain of G1-P4-A3
QSVLTQPPSASGTPGGRVTISCSGSTSNIGRNKVYWYQRLPGTAPKLLIY
LNNQRPSGVPDRFSGSKSGTSASLAISGLQSEDEADYFC [symbol]
FGTGTKVTVL
(SEQ ID NO: 1102)

TABLE 118
SARS2-R3-G1-P3-H6_PelB-F_2020_Jun. 25_H08 Variable
Region amino acid sequences

V_{H} chain of G1-P3-H6
QVQLVQSGAEVKKSGESLEISCKGSGYSFTNYWISWVRQMPGKGLEWMGR
IDPRDSYTNYSPSFQGHVTITVDKSTGAAYLHWSSLKASDTGMYYC [symbol]
WGQGTMVTVSS
(SEQ ID NO: 1103)
V_{L} chain of G1-P3-H6
SSELTQDPAVSVALGQTVRIICQGDSLSRYYANWYQQKSGQAPILVMYGK
DIRPSIPDRFSGSSSGNTASLTITGAQ.EDEADYYC [symbol] VRRRI
KLTVL
(SEQ ID NO: 1104)

TABLE 119
SARS2-R3-G3-P1-G5_PelB-F_2020_Jun. 25_H04 Variable
Region amino acid sequences

V_{H} chain of G3-P1-G5
EVQLVQSGAEVKKPGESLRISCKGSGYTFTNYWIGWVRQMPGKGLEWMGV
IYPGDSDTIYSPSFQGQVTISADKSISTAYLQWSSLKASDTAIYYC [symbol]
WGQGTMVTVSS
(SEQ ID NO: 1105)
V_{L} chain of G3-P1-G5
QSALTQPASVSGSPGQSITISCTGTSSDVGGYNYVSWYQQHPGKAPKLMI
YDVNYRPSGISHRFSGSKSGNTASLTISGLQAEDEADYYC [symbol]
FGTGTKVTVL
(SEQ ID NO: 1106)

TABLE 120
SARS2-R3-G1-P4-C10_PelB-F_2020_Jun. 25_F07
Variable Region amino acid sequences

V_{H} chain of G1-P4-C10
EVQLVESGGGQVKPGGSLRISCAASGFTFENYNMHWVRQAPGKGLEWVSS
ITGHAYYTYYADSLKGRFNISRDNAKKLLYLQLSSLSAEDTALYFC [symbol]
WGHGTLVTVSS
(SEQ ID NO: 1107)
V_{L} chain of G1-P4-C10
SYELTQPPSVSVSPGQTASITCSGDGLPKHYAYWYQQRPGQAPVLLIYKD
TERSSGIPERFSGSGSGTTVTLTINGVQAEDEADYYC [symbol] FG
GGTKLTVL
(SEQ ID NO: 1108)

TABLE 121
SARS2-R3-G1-P1-F10_PelB-F_2020_Jun. 25_B04
Variable Region amino acid sequences

V_{H} chain of G1-P1-F10
QVQLVQSGAEVKKPGSSVKVSCKASGYTFTSYGISWVRQAPGQGLELMGW
ISAYNGNTNYAQKLQGRVTMTTDTSTSTAYMELRSLRSGDTAVYYC [symbol]
WGQGTLVTVSS
(SEQ ID NO: 1109)
V_{L} chain of G1-P1-F10
LPVLTQPPSVSGAPGQRVAISCTGSSSNIGRGYNVHWYQQLPGAAPKLLIY
GNSNRPSGVPDRFSGSKSGTSASLAISGLRSEDEADYYC [symbol]
FGGGTRLTVL
(SEQ ID NO: 1110)

TABLE 122
SARS2-R3-T1-P4-H4_PelB-F_2020_Jun. 20_H04_Variable
Region amino acid sequences

V_{H} chain of T1-P4-H4
EVQLVESGPGLVKPSQTLSLTCTVSGGSISSGGYYWSWIRQHPGKGLEWI
GYIYYSGSTYYNPSLKSRVTISVDTSKNQFSLKLSSVTAADTAVYYC [symbol]
WGQGTMVTVSS
SEQ ID NO: 1111)
V_{L} chain of T1-P4-H4
QSVLTQPPSVSVAPGQTARITCGGDNIGHKGVHWYQQKAGQAPVLVVHDD
SDRPSGIPERFSGSNSGNTATLTISRVEAGDEADYYC [symbol]
FGGGTKLTVL
(SEQ ID NO: 1112)

TABLE 123
SARS2-R3-G2-P1-E8_PelB-F_2020_Jun. 25_A02 Variable
Region amino acid sequences

V_{H} chain of G2-P1-E8
QVQLVQSGGGVVRPGRSLRLSCAASGFTFSSYAMHWVRQAPGKGLEWVAV
ISYDGSNKYYADSVKGRFTISRDNAKNSLYLQMNSLRAEDTAVYYC
Q [symbol] WGGTLVTVSS
(SEQ ID NO: 2785)
V_{L} chain of G2-P1-E8
DIVMTQSPLSLPVTPGEPASISCRSSQSLLHSNGYNYLDWYLQKPGQSPQ
LLIHFGSNRASGVPDRFSGSGSDTDFTLKISRVEAEDVGVYYC [symbol]
FGQGTRLDIK
(SEQ ID NO: 1344)

TABLE 124
SARS2-R3-G1-P1-C3_PelB-F_2020_Jun. 25_A07 Variable
Region amino acid sequences

V_{H} chain of G1-P1-C3
QVQLVQSGGGLVQPGGSLRLSCAASGFTFSSYGMHWVRQAPGKGLEWVAV
ISYDGSNKYYADSVKGRFTISRDNSKNTLYLQMNSLRAEDTAVYYC [symbol]
WGQGTLVTVSS
SEQ ID NO: 1113)
V_{L} chain of G1-P1-C3
QSVLTQPPSVSGAPGERVTFSCTGTTSNIGAGYDVHWYQQLPGTAPKLLI
YDNNIRPSGVPDRFSASKSGTSASLAITGLQSEDEGDYYC [symbol]
FGGGTKLTVL
(SEQ ID NO: 1114)

TABLE 125
SARS2-R3-G3-P1-G2_PelB-F_2020_Jun. 25_G04 Variable
Region amino acid sequences

V_{H} chain of G3-P1-G2
EVQLVQSGGGLVQPGGSLRLPCSASGFDFSNYDMHWVRQAPGKGLEHISI
ITRDGGRTDYAESVKGRFTISRDNSKNTLYLQMTSLREEDTAVYYC [symbol]
WGQGTLVTVSS
(SEQ ID NO: 1115)
V_{L} chain of G3-P1-G2
QSVLTQPPSASGSPGQSVTISCTGTSSDVGGYNHVSWYQQHPGKAPKVLI
YDVSKRPSGVPDRFSGSKSGNTASLTVSGLQAEDEADYYC [symbol]
FGTGTEVTVL
(SEQ ID NO: 1116)

TABLE 126
SARS2-R3-G1-P4-D1_PelB-F_2020_Jun. 25_A08 Variable
Region amino acid sequences

V_{H} chain of G1-P4-D1
QVQLVQSGAEVKKPGSSAKVSCKASGGTFNNYAISWVRQAPGQGPEWMGR
IIPIVDIANYAQRFQGRVTITADESTNTAYMELSSLRSEDTAVYYC [symbol]
WGKGTLVTVSS
(SEQ ID NO: 1117)
V_{L} chain of G1-P4-D1
NFMLTQPHSVSESPGKTVTISCTRSSGSIASNYVQWYQQRPGSAPTTVIY
EDDQRPSGVPDRFSASIDSSSNSASLTISGLKAEDEADYYC [symbol]
FGGGTKLTVL
(SEQ ID NO: 1118)

[0272] The amino acid sequences of the heavy and light chain complementary determining regions of the anti-SARS CoV antibodies are shown in Table 63A-B below:

TABLE 63A
Heavy chain (V_{H}) complementary determining regions (CDRs) of the COVID-
19 antibodies.

| Sequence ID | CDR1-IMGT | CDR2-IMGT | CDR3-IMGT |
|---|---|---|---|
| S1-R3-T1- | GGSIRTHS | IHHSGAT | ARGPGILSY |
| H7 (Ab_12) | (SEQ ID NO: 93) | (SEQ ID NO: 94) | (SEQ ID NO: 95) |
| RBD-R3-E1- | GGSISSYY | IYTSGST | ARDVGFGWFDR |
| G7 (Ab2-10) | (SEQ ID NO: 96) | (SEQ ID NO: 97) | (SEQ ID NO: 98) |
| S1-RBD-R3- | GGSIRTHS | IHHSGAT | ARGPGILSY |
| E1-D8 | (SEQ ID NO: 99) | (SEQ ID NO: 100) | (SEQ ID NO: 101) |
| (Ab_3) | | | |
| S1-RBD-R3- | GDSVSSYSDA | TYYRSKWYN | AREIVATTPFRNYYYGMDV |
| T1-C7 | (SEQ ID NO: 102) | (SEQ ID NO: 103) | (SEQ ID NO: 104) |
| RBD-R3-T1- | GFTFSHYD | IGYDGTNL | ARAANYYDSSGYGRADAF |
| F4 (Ab2-2) | (SEQ ID NO: 105) | (SEQ ID NO: 106) | DI |
| | | | (SEQ ID NO: 107) |
| RBD-R3-E1- | GFTFSDFP | ISYDGNIK | ARGGSSFDI |
| A5 | (SEQ ID NO: 108) | (SEQ ID NO: 109) | (SEQ ID NO: 110) |
| S1-RBD-R3- | GFSLSTTGVG | IYWNDDK | ARISGSGYFYPFDI |
| T1-F5 (Ab2- | (SEQ ID NO: 111) | (SEQ ID NO: 112) | (SEQ ID NO: 113) |
| 7) | | | |
| S1-R3-T1- | GFTFTTYG | ISYDGSIK | ARVGDSSSYYGIDA |
| A12 (Ab_5) | (SEQ ID NO: 114) | (SEQ ID NO: 115) | SEQ ID NO: 116) |
| S1-R3-T1- | GFTFSSHA | ISYDGSYT | ARDWVNFGMDV |
| A6 (Ab_4) | (SEQ ID NO: 117) | (SEQ ID NO: 118) | (SEQ ID NO: 119) |
| S1-RBD-R3- | GYTFSDYY | IDPNSGGT | ARDRGRGGQAGAFDY |
| T1-A5 | (SEQ ID NO: 120) | (SEQ ID NO: 121) | (SEQ ID NO: 978) |
| S1-RBD-R3- | GFTFSSYA | ISYGGSNK | AKVRGSGWYWGSAFDI |
| T1-B3 | (SEQ ID NO: 122) | (SEQ ID NO: 123) | (SEQ ID NO: 124) |
| (Ab_1) | | | |
| S1-RBD-R3- | GYSFTGSH | INPDSGVI | ARDKAIGYVWALDY |
| T1-E7 | (SEQ ID NO: 125) | (SEQ ID NO: 126) | (SEQ ID NO: 127) |
| S1-RBD-R3- | GVSLDTIGMR | IDWDDDK | ARSGLLYDLDV |
| T1-F9 | (SEQ ID NO: 128) | (SEQ ID NO: 129) | (SEQ ID NO: 130) |
| S1-R3-T1- | GFTFSDYP | TSYDGRIK | ARDPGWLRSVGMDV |
| C2 (Ab_6) | (SEQ ID NO: 131) | (SEQ ID NO: 132) | (SEQ ID NO: 133) |
| RBD-R3-E1- | GYSFTSYW | IYPGDSDT | ARGWQWHDY |
| B3 | (SEQ ID NO: 134) | (SEQ ID NO: 135) | (SEQ ID NO: 136) |
| RBD-R3-T1- | GDSVSSRSSA | TYYRSNWNY | VRNMRPDFDL |
| B5 | (SEQ ID NO: 137) | (SEQ ID NO: 138) | (SEQ ID NO: 139) |
| RBD-R3-T1- | GYTFTTSG | ISAYNGNT | ARDFHLYYGMDV |
| H3 (Ab_2) | (SEQ ID NO: 140) | (SEQ ID NO: 141) | (SEQ ID NO: 142) |
| S1-R3-T1- | GGTFSSYA | INPNSGGT | ARGSGGYYLG |
| C4 (Ab_8) | (SEQ ID NO: 143) | (SEQ ID NO: 144) | (SEQ ID NO: 145) |
| S1-RBD-R3- | GGTFSSYT | IIPILGTP | AVGSGWYSGFDY |
| T1-B12 | (SEQ ID NO: 146) | (SEQ ID NO: 147) | (SEQ ID NO: 148) |
| S1-RBD-R3- | GFTFSSYW | IKQDGSEK | ARGFYYYGAFDI |
| T1-G5 | (SEQ ID NO: 149) | (SEQ ID NO: 150) | (SEQ ID NO: 151) |
| S1-RBD-R3- | GFTFDDYA | IDWNSGVI | AKDAYSYGFLGAFDI |
| T1-E2 (Ab7) | (SEQ ID NO: 152) | (SEQ ID NO: 153) | (SEQ ID NO: 154) |
| RBD-R3-T1- | GFTFDDYA | IDWNSGVI | ARDILPSNFDGKKIIVFQPPA |
| F7 | (SEQ ID NO: 155) | (SEQ ID NO: 156) | KRDLDNYYGMDV |
| | | | (SEQ ID NO: 157) |
| S1-RBD-R3- | GYSFTSNW | IFPGDSDT | ARESYNAYGS |
| T1-G1 | (SEQ ID NO: 158) | (SEQ ID NO: 159) | (SEQ ID NO: 160) |
| S1-RBD-R3- | GYTFTSYG | ISAYNGNT | ARGFPQLGSDY |
| T1-C2 | (SEQ ID NO: 161) | (SEQ ID NO: 162) | (SEQ ID NO: 163) |
| S1-RBD-R3- | GGTFSSYA | ISGYNGNT | ARQMKDSGNYWEYYYYG |
| T1-H8 | (SEQ ID NO: 164) | (SEQ ID NO: 165) | MDV |
| | | | (SEQ ID NO: 166) |
| S1-RBD-R3- | GYTFTSYG | ISTYNGNT | ARDVFGHFDY |
| E1-E8 | (SEQ ID NO: 167) | (SEQ ID NO: 168) | (SEQ ID NO: 169) |
| RBD-R3-T1- | GFSLTTTGVS | IHWDDDK | ASFIMTVYAEYFED |
| H2 | (SEQ ID NO: 170) | (SEQ ID NO: 171) | (SEQ ID NO: 172) |
| S1-RBD-R3- | GFSLSTSAMC | IDWDNDR | AHSPYDSIWGSFRPSVYYF |
| T1-B7 | (SEQ ID NO: 173) | (SEQ ID NO: 174) | DY |
| | | | (SEQ ID NO: 175) |
| S1-RBD-R3- | GFTFSDYY | ISSSSSDT | AMPTREPAY |
| E1-E5 | (SEQ ID NO: 176) | (SEQ ID NO: 177) | (SEQ ID NO: 178) |
| S1-R3-T1- | GFAFSDFP | ISYDGSLK | AREGVSNSRPFDH |
| H6 | (SEQ ID NO: 179) | (SEQ ID NO: 180) | (SEQ ID NO: 181) |
| S1-RBD-R3- | GFTFSSYA | ISSNGGST | TRDLWSGSADSFDI |
| E1-C6 | (SEQ ID NO: 182) | (SEQ ID NO: 183) | (SEQ ID NO: 184) |
| S1-RBD-R3- | GFPFNAYY | INQDGSEK | ARLYWWGMDV |
| E1-F2 | (SEQ ID NO: 185) | (SEQ ID NO: 186) | (SEQ ID NO: 187) |
| S1-RBD-R3- | GFTFDDYA | IDWNSGVI | AKDAYSYGFLGAFDI |
| T1-C3 | (SEQ ID NO: 188) | (SEQ ID NO: 189) | (SEQ ID NO: 190) |
| S1-RBD-R3- | GFTFDDYA | ISWNSGSI | ARDWWGSIDH |
| T1-G12 | (SEQ ID NO: 191) | (SEQ ID NO: 192) | (SEQ ID NO: 193) |
| S1-RBD-R3- | GGSISSSNW | IYHSGST | ARRGGTYHRGAFDI |
| E1-F1 | (SEQ ID NO: 194) | (SEQ ID NO: 195) | (SEQ ID NO: 196) |
| S1-RBD-R3- | GASISNSF | TSYSGNS | ARREWIKGHFDY |
| E1-H8 | (SEQ ID NO: 197) | (SEQ ID NO: 198) | (SEQ ID NO: 199) |
| S1-RBD-R3- | GGSFTTHS | ILPGGAT | ARGPGILSY |
| T1-F1 | (SEQ ID NO: 200) | (SEQ ID NO: 201) | (SEQ ID NO: 202) |
| S1-R3-T1- | GGSFRTHS | IHHSGAT | ARGPGILSY |
| B10 | (SEQ ID NO: 203) | (SEQ ID NO: 204) | (SEQ ID NO: 205) |
| RBD-R3-E1- | GGSIRTHS | IHHSGAT | ARGPGILSY |
| D12 | (SEQ ID NO: 206) | (SEQ ID NO: 207) | (SEQ ID NO: 208) |
| RBD-R3-T1- | GGSIRTHS | IHHSGAT | GRGPGILSY |
| C5 | (SEQ ID NO: 209) | (SEQ ID NO: 210) | (SEQ ID NO: 211) |
| S1-RBD-R3- | GYSFTSYW | IYPGDSDT | ARQGDGGGYDY |
| T1-B4 | (SEQ ID NO: 212) | (SEQ ID NO: 213) | (SEQ ID NO: 214) |
| S1-RBD-R3- | RYSFSNYW | IYPYDSDT | ARQGSSQSFDI |
| E1-E7 | (SEQ ID NO: 215) | (SEQ ID NO: 216) | (SEQ ID NO: 217) |
| S1-RBD-R3- | GYSFTSYW | IYPGDSDT | ARRRGSAAAFDT |
| T1-C8 | (SEQ ID NO: 218) | (SEQ ID NO: 219) | (SEQ ID NO: 220) |
| S1-RBD-R3- | GYSFTSYW | IYPGDSDT | ARTTYSYGSFDY |
| T1-D7 | (SEQ ID NO: 221) | (SEQ ID NO: 222) | (SEQ ID NO: 223) |
| RBD-R3-E1- | GDSVTSNSAA | TYYSSKWYN | ARGWLRLSFDP |
| F5 | (SEQ ID NO: 224) | (SEQ ID NO: 225) | (SEQ ID NO: 226) |
| Ab_13 | GFSLSTSGVG | IYWDDDK | ARISGSGYFYPFDI |
| | (SEQ ID NO: 754) | (SEQ ID NO:755) | (SEQ ID NO: 756) |
| Ab_14 | GDSVSSNSAA | TYYRSRWYN | AREIRGFDY |
| | (SEQ ID NO: 757) | (SEQ ID NO: 758) | (SEQ ID NO: 759) |
| Ab_15 | GFTFGDYA | IRSKAYGGTT | TTADDDMDV |
| | (SEQ ID NO: 760) | (SEQ ID NO: 761) | (SEQ ID NO: 762) |
| Ab_16 | GFTFSNYG | IWERGSKK | AREGISMTGAEYFQH |
| | (SEQ ID NO: 763) | (SEQ ID NO: 764) | (SEQ ID NO: 765) |
| Ab_17 | GFTFDDYA | IDWNSGVI | AKDIGPGGSGSYYAFDI |
| | (SEQ ID NO: 766) | (SEQ ID NO: 767) | (SEQ ID NO: 768) |
| Ab_18 | GFSFSRYG | IRHDGSKK | AKDGRLEAALDD |
| | (SEQ ID NO: 769) | (SEQ ID NO: 770) | (SEQ ID NO: 771) |
| Ab_19 | GYSFTSYW | IYPGDSDT | ARRGDLDAFDI |
| | (SEQ ID NO: 772) | (SEQ ID NO: 773) | (SEQ ID NO: 774) |
| Ab_20 | GYRLSDYY | IKQDGSEK | ARVRGWSRGYFDY |
| | (SEQ ID NO: 775) | (SEQ ID NO: 776) | (SEQ ID NO: 777) |
| Ab_21 | GFTFDDYA | ISWNSGSI | ARDWWGSIDH |
| | (SEQ ID NO: 778) | (SEQ ID NO: 779) | (SEQ ID NO: 780) |
| Ab_22 | GFTFSHYD | IGYDGTNL | ARAANYYDSSGYGRADAF |
| | (SEQ ID NO: 781) | (SEQ ID NO: 782) | DI (SEQ ID NO: 783) |
| Ab_23 | GGTFSTYG | IIPSLGIP | ARENIDLATNDF |
| | (SEQ ID NO: 784) | (SEQ ID NO: 785) | (SEQ ID NO: 786) |
| Ab_24 | GGTFSSSG | IIPMLGTP | ARDGGNYDY |
| | (SEQ ID NO: 787) | (SEQ ID NO: 788) | (SEQ ID NO: 789) |
| Ab_25 | GFTFSSYW | IKQDGSEK | ARGFYYYGAFDI |
| | (SEQ ID NO: 790) | (SEQ ID NO: 791) | (SEQ ID NO: 792) |
| Ab_26 | GFTFDDYA | IDWNSGVI | AKDAYSYGFLGAFDI |
| | (SEQ ID NO: 793) | (SEQ ID NO: 794) | (SEQ ID NO: 795) |
| Ab_27 | GYSFTGSH | INPDSGVI | ARDKAIGYVWALDY |
| | (SEQ ID NO: 796) | (SEQ ID NO: 797) | (SEQ ID NO: 798) |
| Ab_28 | GASISNSF | TSYSGNS | ARREWIKGHFDY |
| | (SEQ ID NO: 799) | (SEQ ID NO: 800) | (SEQ ID NO: 801) |
| Ab_38 | GFSLTTSGVS | IHWDDDK | ASFIMTVY AEYFED |
| | (SEQ ID NO: 983) | (SEQ ID NO: 984) | (SEQ ID NO: 985) |
| wcS2-T4-E7 | GFTFSSYA | ISYDGSNK | ARVNSGSYYGAFDI |
| | (SEQ ID NO: 122) | (SEQ ID NO: | (SEQ ID NO: 1163) |
| | | 1143) | |
| wcS2-E1-A9 | GFTFDDYA | ISWNSGSI | ARDGGIQLSSFEY |
| | (SEQ ID NO: 152) | (SEQ ID NO: 192) | (SEQ ID NO: 1164) |
| wcS2-T4-H8 | GFTFSSYG | ISYDGSNK | ARGSGSYLTDFDY |
| | (SEQ ID NO: | (SEQ ID NO: | (SEQ ID NO: 1165) |
| | 1119) | 1143) | |
| wcS2-T3-F5 | GFTFSSYA | MSYDGSNK | ARTGGYLRPIDY |
| | (SEQ ID NO: 122) | (SEQ ID NO: | (SEQ ID NO: 1166) |
| | | 1144) | |
| wcS2-E2-C1 | GFTFSSYA | ISYDGSNK | ARDRSGSYWGAFDI |
| | (SEQ ID NO: 122) | (SEQ ID NO: | (SEQ ID NO: 1167) |
| | | 1143) | |
| wcS2-T4-C9 | GFTFSSYG | ISYDGSNK | AKGRGSYSTYFDY |
| | (SEQ ID NO: | (SEQ ID NO: | (SEQ ID NO: 1168) |
| | 1119) | 1143) | |
| wcS2-T3-B9 | GFTFSGYA | VSYDGSNK | ARSEGYSSGWPLDY |
| | (SEQ ID NO: | (SEQ ID NO: | (SEQ ID NO: 1169) |
| | 1120) | 1145) | |
| wcS2-E3-C8 | GYNFIDYW | IYPGDSDA | ARGYAMDV |
| | (SEQ ID NO: | (SEQ ID NO: | (SEQ ID NO: 1170) |
| | 1121) | 1146) | |
| wcS2-T4-F8 | GHTFLGHY | INPNSGVT | ARERTTGGAFDI |
| | (SEQ ID NO: | (SEQ ID NO: | (SEQ ID NO: 1171) |
| | 1122) | 1147) | |
| wcS2-T3-F1 | GFTFSSYA | ISYDGSNK | ARDRSGSYWGAFDI |
| | (SEQ ID NO: 122) | (SEQ ID NO: | (SEQ ID NO: 1167) |
| | | 1143) | |
| wcS2-E2-B1 | GFTFSSYA | ISYDGSNK | ARGDYYYYMDV |
| | (SEQ ID NO: 122) | (SEQ ID NO: | (SEQ ID NO: 1172) |
| | | 1143) | |
| wcS2-T2-G3 | GFTFSSYA | ISYDGSNK | ARGLGGGYYYGMDV |
| | (SEQ ID NO: 122) | (SEQ ID NO: | (SEQ ID NO: 1173) |
| | | 1143) | |
| wcS2-T1-A6 | GYNFIDYW | TYPGDSDA | ARG*AMDV |
| | (SEQ ID NO: | (SEQ ID NO: | (SEQ ID NO: 1174) |
| | 1121) | 1146) | |
| wcS2-T4-D4 | GFTFSSYA | ISYDGSNK | ARGNRGSYYGAFDS |
| | (SEQ ID NO: 122) | (SEQ ID NO: | (SEQ ID NO: 1175) |
| | | 1143) | |
| wcS2-T2- | GFTFSSYA | ISYDGSNK | ARDNSGSYYGAFDI |
| D10 | (SEQ ID NO: 122) | (SEQ ID NO: | (SEQ ID NO: 1176) |
| | | 1143) | |
| wcS2-T1-G9 | GFTFSSYG | ISYDGSNK | AKGRGSYSTYFDY |
| | (SEQ ID NO: | (SEQ ID NO: | (SEQ ID NO: 1168) |
| | 1119) | 1143) | |
| wcS2-E3-H7 | GFTFSIYG | ISYDGSNK | AKGRGSYSTYFDY |
| | (SEQ ID NO: | (SEQ ID NO: | (SEQ ID NO: 1168) |
| | 1123) | 1143) | |
| wcS2-T2- | GFSLSTSGVG | IYWDDDK | AHRRPDWDAFDV |
| C11 | (SEQ ID NO: 754) | (SEQ ID NO: 755) | (SEQ ID NO: 1177) |
| SARS2-R3- | GFTFSSYA | ISYDGSNK | ARSDGYPYEPFDY |
| G2-P1- | (SEQ ID NO: 122) | (SEQ ID NO: | (SEQ ID NO: 1178) |
| H9_PelB- | | 1143) | |
| F_2020_Jun. | | | |
| 19_D08 | | | |
| SARS2-R3- | GFTFSSYG | ISYDGSNK | ARGSGITGAFRD |
| G3-P1- | (SEQ ID NO: | (SEQ ID NO: | (SEQ ID NO: 1179) |
| F8_PelB- | 1119) | 1143) | |
| F_2020_Jun. | | | |
| 19_F11 | | | |
| SARS2-R3- | GFTFSSYG | ISYDGSNK | ARPQGGAYNGYFDS |
| G2-P1- | (SEQ ID NO: | (SEQ ID NO: | (SEQ ID NO: 1180) |
| B4_PelB- | 1119) | 1143) | |
| F_2020_Jun. | | | |
| 19_B02 | | | |
| SARS2-R3- | GFTFSSYA (SEQ | ISYDGSNK (SEQ | ARSDSGNYYGAFDI (SEQ |
| G3-P1- | ID NO: 122) | ID NO: 1143) | ID NO: 1181) |
| B2_PelB- | | | |
| F_2020_Jun. | | | |
| 19_A08 | | | |
| SARS2-R3- | GFNFGTFG (SEQ | ISYDGSNK (SEQ | ARVRGSGYPHAFDI (SEQ |
| G3-P1- | ID NO: 1124) | ID NO: 1143) | ID NO: 1182) |
| B3_PelB- | | | |
| F_2020_Jun. | | | |
| 19_B08 | | | |
| SARS2-R3- | GGTFSSYA (SEQ | IIPIFGTA (SEQ | ARYKWEPNVGGAFDI (SEQ |
| G1-P3- | ID NO: 143) | ID NO: 1148) | ID NO: 1183) |
| E8_PelB- | | | |
| F_2020_Jun. | | | |
| 19_H04 | | | |
| SARS2-R3- | GYTFTSYG (SEQ | ISAYNGNT (SEQ | AKGGSYGRYGMDV (SEQ |
| G1-P2- | ID NO: 161) | ID NO: 141) | ID NO: 1184) |
| D7_PelB- | | | |
| F_2020_Jun. | | | |
| 19_H09 | | | |
| SARS2-R3- | GFSLSTSGVG | IYWDDDK (SEQ | AKMGNAWTFEH (SEQ ID |
| G1-P1- | (SEQ ID NO: 754) | ID NO: 755) | NO: 1185) |
| C6_PelB- | | | |
| F_2020_Jun. | | | |
| 19_H02 | | | |
| SARS2-R3- | GFTFSSYA (SEQ | ISYDGSNK (SEQ | ARANGCPY*PFYY (SEQ ID |
| T-P2- | ID NO: 122) | ID NO: 1143) | NO: 1186) |
| E12_PelB- | | | |
| F_2020_Jun. | | | |
| 19_D07 | | | |
| SARS2-R3- | GFIFSSYG (SEQ | ISYDGSNK (SEQ | ARCSGGSCYFNGMDV |
| G2-P1- | ID NO: 1125) | ID NO: 1143) | (SEQ ID NO: 1187) |
| D12_PelB- | | | |
| F_2020_Jun. | | | |
| 19_H04 | | | |
| SARS2-R3- | GFTFSSYA (SEQ | ISYDGSNK (SEQ | ARDRSGSYWGAFDI (SEQ |
| G1-P2- | ID NO: 122) | ID NO: 1143) | ID NO: 1167) |
| E8_PelB- | | | |
| F_2020_Jun. | | | |
| 19_E10 | | | |
| SARS2-R3- | GFTFSSYA (SEQ | ISYDGSNK (SEQ | ARDRSGSYWGAFDI (SEQ |
| G1-P1- | ID NO: 122) | ID NO: 1143) | ID NO: 1167) |
| A10_PelB- | | | |
| F_2020_Jun. | | | |
| 19_H01 | | | |
| SARS2-R3- | GFTFSSYG (SEQ | ISYDGSNK (SEQ | ARDYGLRYFDY (SEQ ID |
| G1-P3- | ID NO: 1119) | ID NO: 1143) | NO: 1188) |
| B5_PelB- | | | |
| F_2020_Jun. | | | |
| 19_D02 | | | |
| SARS2-R3- | GYTFTSYG (SEQ | IIPIFGTA (SEQ | ARSMVQGVIRFYGMDV |
| G3-P1- | ID NO: 161) | ID NO: 1148) | (SEQ ID NO: 1189) |
| A2_PelB- | | | |
| F_2020_Jun. | | | |
| 19_B07 | | | |
| SARS2-R3- | GFTFSSYA (SEQ | ISYDGSNK (SEQ | ARSSNYYYMDV (SEQ ID |
| G3-P1- | ID NO: 122) | ID NO: 1143) | NO: 1190) |
| D1_PelB- | | | |
| F_2020_Jun. | | | |
| 19_G09 | | | |
| SARS2-R3- | GFTFSSYA (SEQ | ISYDGSHK (SEQ | ARVLGGSYRMGAFDI (SEQ |
| G1-P2- | ID NO: 122) | ID NO: 1149) | ID NO: 1191) |
| D4_PelB- | | | |
| F_2020_Jun. | | | |
| 19_G09 | | | |
| SARS2-R3- | GFTFSSYA (SEQ | ISYDGSNK (SEQ | SRDAVAGYRGGFDY (SEQ |
| G1-P1- | ID NO: 122) | ID NO: 1143) | ID NO: 1192) |
| B6_PelB- | | | |
| F_2020_Jun. | | | |
| 19_E02 | | | |
| SARS2-R3- | GFSLSTSGVG | IYWDDDK (SEQ | AHLDTFYGMDV (SEQ ID |
| G3-P1- | (SEQ ID NO: 754) | ID NO: 755) | NO: 1193) |
| G8_PelB- | | | |
| F_2020_Jun. | | | |
| 25_A05 | | | |
| SARS2-R3- | GFSLTTSGVG | IYWDDDK (SEQ | AHSRGLWGAFDI (SEQ ID |
| G1-P1- | (SEQ ID NO: | ID NO: 755) | NO: 1194) |
| F11_PelB- | 1126) | | |
| F_2020_Jun. | | | |
| 25_B05 | | | |
| SARS2-R3- | GITFYSYG (SEQ | ISNIYNT (SEQ ID | AKGIAAADY (SEQ ID NO: |
| T1-P3- | ID NO: 1127) | NO: 1150) | 1195) |
| F4_PelB- | | | |
| F_2020_Jun. | | | |
| 20_C03 | | | |
| SARS2-R3- | GFTFSSYA (SEQ | ISGSGGST (SEQ | ANDIQGDPVR (SEQ ID NO: |
| G1-P2- | ID NO: 122) | ID NO: 1151) | 1196) |
| B8_PelB- | | | |
| F_2020_Jun. | | | |
| 25_C06 | | | |
| SARS2-R3- | GFTFSSYA (SEQ | ISYDGSNK (SEQ | ARARGYSYGHHFDY (SEQ |
| G1-P2- | ID NO: 122) | ID NO: 1143) | ID NO: 1197) |
| D3_PelB- | | | |
| F_2020_Jun. | | | |
| 25_C12 | | | |
| SARS2-R3- | GFTFSSYG (SEQ | ISSSSKYI (SEQ | ARDADTSSSESDY (SEQ ID |
| G1-P4- | ID NO: 1119) | ID NO: 1152) | NO: 1198) |
| C5_PelB- | | | |
| F_2020_Jun. | | | |
| 25_C07 | | | |
| SARS2-R3- | GYTFSSYA (SEQ | ISAFNGNT (SEQ | ARDGGKLDY (SEQ ID NO: |
| G1-P2- | ID NO: 1128) | ID NO: 1153) | 1199) |
| D6_PelB- | | | |
| F_2020_Jun. | | | |
| 25_D02 | | | |
| SARS2-R3- | GYTFTSYY (SEQ | INPSGGST (SEQ | ARDLPLRYRPNAFDI (SEQ |
| G1-P1- | ID NO: 1129) | ID NO: 1154) | ID NO: 1200) |
| B7_PelB- | | | |
| F_2020_Jun. | | | |
| 25_A03 | | | |
| 95_PelB- | GFTFSNYA (SEQ | ISYDGSTE (SEQ | ARDPRYCSGAGCYYYGMD |
| F_2020_Jun. | ID NO: 1130) | ID NO: 1155) | V (SEQ ID NO: 1201) |
| 25_G11 | | | |
| 73_PelB- | GFTFSSYE (SEQ | ISYDGSNK (SEQ | ARDPSYGLDY (SEQ ID NO: |
| F_2020_Jun. | ID NO: 1131) | ID NO: 1143) | 1202) |
| 25_F09 | | | |
| SARS2-R3- | GFTFSSYA (SEQ | ISYDGSNK (SEQ | ARDRGGYSGYLDY (SEQ |
| G3-P1- | ID NO: 122) | ID NO: 1143) | ID NO: 1203) |
| G9_PelB- | | | |
| F_2020_Jun. | | | |
| 25_B05 | | | |
| SARS2-R3- | GYTFTGYY (SEQ | INPNSGGT (SEQ | ARESGLLWFGDYYYGMDV |
| G1-P3- | ID NO: 1132) | ID NO: 144) | (SEQ ID NO: 1204) |
| G7_PelB- | | | |
| F_2020_Jun. | | | |
| 25_H01 | | | |
| SARS2-R3- | GSTFNNYA (SEQ | IIPIVDIA (SEQ ID | ARGGSQGAYYMDV (SEQ |
| G1-P4- | ID NO: 1133) | NO: 1156) | ID NO: 1205) |
| A2_PelB- | | | |
| F_2020_Jun. | | | |
| 25_A06 | | | |
| SARS2-R3- | GYTFTSYG (SEQ | ISAYNGNT (SEQ | ARGGSYGRYGMDV (SEQ |
| G3-P1- | ID NO: 161) | ID NO: 141) | ID NO: 1206) |
| G1_PelB- | | | |
| F_2020_Jun. | | | |
| 25_F04 | | | |
| SARS2-R3- | GFTFSSYA (SEQ | ISYDGSNK (SEQ | ARGLSGTYRATTFDF (SEQ |
| G3-P1- | ID NO: 122) | ID NO: 1143) | ID NO: 1207) |
| F1_PelB- | | | |
| F_2020_Jun. | | | |
| 25_C04 | | | |
| SARS2-R3- | GGSFSSYH (SEQ | IDHYGSP (SEQ | ARGYAFDI (SEQ ID NO: |
| G1-P3- | ID NO: 1134) | ID NO: 1157) | 1208) |
| H10_PelB- | | | |
| F_2020_Jun. | | | |
| 25_H10 | | | |
| 85_PelB- | GYNFNDYW | IYPGDSDT (SEQ | ARGYAMDV (SEQ ID NO: |
| F_2020_Jun. | (SEQ ID NO: | ID NO: 135) | 1170) |
| 25_G10 | 1135) | | |
| SARS2-R3- | GYTFSNYD (SEQ | MNPNSGNT | ARGYGMDV (SEQ ID NO: |
| G1-P4- | ID NO: 1136) | (SEQ ID NO: | 1209) |
| A3_PelB- | | 1158) | |
| F_2020_Jun. | | | |
| 25_B06 | | | |
| SARS2-R3- | GYSFTNYW | IDPRDSYT (SEQ | ARHPAGGTSFDM (SEQ ID |
| G1-P3- | (SEQ ID NO: | ID NO: 1159) | NO: 1210) |
| H6_PelB- | 1137) | | |
| F_2020_Jun. | | | |
| 25_H08 | | | |
| SARS2-R3- | GYTFTNYW | TYPGDSDT (SEQ | ARRAGAQGAFDI (SEQ ID |
| G3-P1- | (SEQ ID NO: | ID NO: 135) | NO: 1211) |
| G5_PelB- | 1138) | | |
| F_2020_Jun. | | | |
| 25_H04 | | | |
| SARS2-R3- | GFTFENYN (SEQ | ITGHAYYT (SEQ | ARSNYASAGHGMDV (SEQ |
| G1-P4- | ID NO: 1139) | ID NO: 1160) | ID NO: 1212) |
| C10_PelB- | | | |
| F_2020_Jun. | | | |
| 25_F07 | | | |
| SARS2-R3- | GYTFTSYG (SEQ | ISAYNGNT (SEQ | ARTVGSLDY (SEQ ID NO: |
| G1-P1- | ID NO: 161) | ID NO: 141) | 1213) |
| F10_PelB- | | | |
| F_2020_Jun. | | | |
| 25_B04 | | | |
| SARS2-R3- | GGSISSGGYY | IYYSGST (SEQ | ARYDRDAFDI (SEQ ID NO: |
| T1-P4- | (SEQ ID NO: | ID NO: 1161) | 1214) |
| H4_PelB- | 1140) | | |
| F_2020_Jun. | | | |
| 20_H04 | | | |
| SARS2-R3- | GFTFSSYA (SEQ | ISYDGSNK (SEQ | ASGSYAQFDY (SEQ ID NO: |
| G2-P1- | ID NO: 122) | ID NO: 1143) | 1215) |
| E8_PelB- | | | |
| F_2020_Jun. | | | |
| 25_A02 | | | |
| SARS2-R3- | GFTFSSYG (SEQ | ISYDGSNK (SEQ | ATPLGFFGAFDI (SEQ ID |
| G1-P1- | ID NO: 1119) | ID NO: 1143) | NO: 1216) |
| C3_PelB- | | | |
| F_2020_Jun. | | | |
| 25_A07 | | | |
| SARS2-R3- | GFDFSNYD (SEQ | ITRDGGRT (SEQ | DKAGGE (SEQ ID NO: 1217) |
| G3-P1- | ID NO: 1141) | ID NO: 1162) | |
| G2_PelB- | | | |
| F_2020_Jun. | | | |
| 25_G04 | | | |
| SARS2-R3- | GGTFNNYA | IIPIVDIA (SEQ ID | VRGGSQGAYYMDV (SEQ |
| G1-P4- | (SEQ ID NO: | NO: 1156) | ID NO: 1218) |
| D1_PelB- | 1142) | | |
| F_2020_Jun. | | | |
| 25_A08 | | | |

TABLE 63B
Light chain (V_{L}) complementary determining regions (CDRs) of the COVID-19
antibodies

| Sequence ID | CDR1-IMGT | CDR2-IMGT | CDR3-IMGT |
|---|---|---|---|
| S1-R3-T1-H7 | SSNIGSNT | SNN | AAWDDSLNVHYV |
| (Ab12) | (SEQ ID NO: 227) | (SEQ ID NO: 228) | (SEQ ID NO: 229) |
| RBD-R3-E1- | SGSIASNY | EDN | QSFDSASLWV |
| G7 (Ab2-10) | (SEQ ID NO: 230) | (SEQ ID NO: 231) | (SEQ ID NO: 232) |
| S1-RBD-R3- | SSNIGSND | SNN | ATWDDSLSAGV |
| E1-D8 (Ab_3) | (SEQ ID NO: 233) | (SEQ ID NO: 234) | (SEQ ID NO: 235) |
| S1-RBD-R3- | SGSIASNY | QDK | QSYDSSSLWV |
| T1-C7 | (SEQ ID NO: 236) | (SEQ ID NO: 237) | (SEQ ID NO: 238) |
| RBD-R3-T1- | TGSIAGNY | DDN | QSYDSGNRGV |
| F4 (Ab2-2) | (SEQ ID NO: 239) | (SEQ ID NO: 240) | (SEQ ID NO: 241) |
| RBD-R3-E1- | TSNIGNNA | YNE | AAWDDSLSGHVV |
| A5 | (SEQ ID NO: 242) | (SEQ ID NO: 243) | (SEQ ID NO: 244) |
| S1-RBD-R3- | SGSIASNY | EDN | QSYDSSSLWV |
| T1-F5 | (SEQ ID NO: 245) | (SEQ ID NO: 246) | (SEQ ID NO: 247) |
| (Ab2-7) | | | |
| S1-R3-T1- | SSNIGSNS | SNN | AAWDDSLTGYV |
| A12 (Ab_5) | (SEQ ID NO: 248) | (SEQ ID NO: 249) | (SEQ ID NO: 250) |
| S1-R3-T1-A6 | SSDVGGYNY | EVS | AAWDDSLSGPV |
| (Ab_4) | (SEQ ID NO: 251) | (SEQ ID NO: 252) | (SEQ ID NO: 253) |
| S1-RBD-R3- | KIGSKS | DDS | HVWDSSSDQNV |
| T1-A5 | (SEQ ID NO: 254) | (SEQ ID NO: 255) | (SEQ ID NO: 256) |
| S1-RBD-R3- | SLRAYF | GQD | NSRDSGENHLI |
| T1-B3 (Ab_1) | (SEQ ID NO: 257) | (SEQ ID NO: 258) | (SEQ ID NO: 259) |
| S1-RBD-R3- | SSDVGTYNR | EVS | SSYTRTFTYV |
| T1-E7 | (SEQ ID NO: 260) | (SEQ ID NO: 261) | (SEQ ID NO: 262) |
| S1-RBD-R3- | DSDIGANF | RNT | QSYDSSLSAYV |
| T1-F9 | (SEQ ID NO: 263) | (SEQ ID NO: 264) | (SEQ ID NO: 265) |
| S1-R3-T1-C2 | SGSIARNY | ADR | QSYDSSNQAAV |
| (Ab_6) | (SEQ ID NO: 266) | (SEQ ID NO: 267) | (SEQ ID NO: 268) |
| RBD-R3-E1- | SLRSYY | DKD | NSRDRSDNHVV |
| B3 | (SEQ ID NO: 269) | (SEQ ID NO: 270) | (SEQ ID NO: 271) |
| RBD-R3-T1- | QSVSNN | DAT | QQYDNLPV |
| B5 | (SEQ ID NO: 272) | (SEQ ID NO: 273) | (SEQ ID NO: 274) |
| RBD-R3-T1- | SSDVGAYNY | DVT | AVWDDGLNGRVV |
| H3 (Ab_2) | (SEQ ID NO: 275) | (SEQ ID NO: 276) | (SEQ ID NO: 277) |
| S1-R3-T1-C4 | SNNVGNQG | MNN | SAWDSSLSRWV |
| (Ab_8) | (SEQ ID NO: 278) | (SEQ ID NO: 279) | (SEQ ID NO: 280) |
| S1-RBD-R3- | SGSIASNY | EDS | QSFHNSNPVI |
| T1-B12 | (SEQ ID NO: 281) | (SEQ ID NO: 282) | (SEQ ID NO: 283) |
| S1-RBD-R3- | SGSIASNY | EDN | QSYDSSNHWV |
| T1-G5 | (SEQ ID NO: 284) | (SEQ ID NO: 285) | (SEQ ID NO: 286) |
| S1-RBD-R3- | NIGSKS | EDR | QVWDGDSDHYV |
| T1-E2 (Ab7) | (SEQ ID NO: 287) | (SEQ ID NO: 288) | (SEQ ID NO: 289) |
| RBD-R3-T1- | SSDVGGYNL | EGS | SSYTITDVVV |
| F7 | (SEQ ID NO: 290) | (SEQ ID NO: 291) | (SEQ ID NO: 292) |
| S1-RBD-R3- | SSNIGSNP | SNN | AAWDDSLSGVV |
| T1-G1 | (SEQ ID NO: 293) | (SEQ ID NO: 294) | (SEQ ID NO: 295) |
| S1-RBD-R3- | SGSIASNY | EDN | QSYDSTNWV |
| T1-C2 | (SEQ ID NO: 296) | (SEQ ID NO: 297) | (SEQ ID NO: 298) |
| S1-RBD-R3- | NIGSES | EDR | QVWNPSGSLQYV |
| T1-H8 | (SEQ ID NO: 299) | (SEQ ID NO: 300) | (SEQ ID NO: 301) |
| S1-RBD-R3- | SGNIATNY | EDN | KSYDDGNHV |
| E1-E8 | (SEQ ID NO: 302) | (SEQ ID NO: 303) | (SEQ ID NO: 304) |
| RBD-R3-T1- | QSVSSN | DVS | QQRGVWPLT |
| H2 | (SEQ ID NO: 305) | (SEQ ID NO: 306) | (SEQ ID NO: 307) |
| S1-RBD-R3- | SGSIVSSY | EHN | QSYDSQNGV |
| T1-B7 | (SEQ ID NO: 308) | (SEQ ID NO: 309) | (SEQ ID NO: 310) |
| S1-RBD-R3- | SSDLGTYNY | DVF | SSYTSSSTYV |
| E1-E5 | (SEQ ID NO: 311) | (SEQ ID NO: 312) | (SEQ ID NO: 313) |
| S1-R3-T1-H6 | SIGTKS | DDD | QVWESDDDDLV |
| | (SEQ ID NO: 314) | (SEQ ID NO: 315) | (SEQ ID NO: 316) |
| S1-RBD-R3- | SLRRYY | GKN | NSRDISDNQWQWI |
| E1-C6 | (SEQ ID NO: 317) | (SEQ ID NO: 318) | (SEQ ID NO: 319) |
| S1-RBD-R3- | SSDVGGYKY | DVN | SSYTGRMNLYV |
| E1-F2 | (SEQ ID NO: 320) | (SEQ ID NO: 321) | (SEQ ID NO: 322) |
| S1-RBD-R3- | NIRTKG | YAS | QVWDSSSDLVV |
| T1-C3 | (SEQ ID NO: 323) | (SEQ ID NO: 324) | (SEQ ID NO: 325) |
| S1-RBD-R3- | SSDVGGYDY | DVS | SSYTSSSPVV |
| T1-G12 | (SEQ ID NO: 326) | (SEQ ID NO: 327) | (SEQ ID NO: 328) |
| S1-RBD-R3- | SRDVGSYDL | EGS | SSYTSSNSLV |
| E1-F1 | (SEQ ID NO: 329) | (SEQ ID NO: 330) | (SEQ ID NO: 331) |
| S1-RBD-R3- | GGSIASNY | EDN | QSYDSSNPVV |
| E1-H8 | (SEQ ID NO: 332) | (SEQ ID NO: 333) | (SEQ ID NO: 334) |
| S1-RBD-R3- | SSIGSND | SNN | AWDDSLSAVV |
| T1-F1 | (SEQ ID NO: 335) | (SEQ ID NO: 336) | (SEQ ID NO: 337) |
| S1-R3-T1- | SSNIGSNT | INN | AEWYDSLNVHYV |
| B10 | (SEQ ID NO: 338) | (SEQ ID NO: 339) | (SEQ ID NO: 340) |
| RBD-R3-E1- | SSNIGSNT | INN | AECYDSLNDHYV |
| D12 | (SEQ ID NO: 341) | (SEQ ID NO: 342) | (SEQ ID NO: 343) |
| RBD-R3-T1- | SSNIGSNT | SNN | AAWDDSLNVHYV |
| C5 | (SEQ ID NO: 344) | (SEQ ID NO: 345) | (SEQ ID NO: 346) |
| S1-RBD-R3- | SSNIGSNP | NNN | AAWDDSLNGL |
| T1-B4 | (SEQ ID NO: 347) | (SEQ ID NO: 348) | (SEQ ID NO: 349) |
| S1-RBD-R3- | SLRSYY | GKN | NSRDSSGDVRV |
| E1-E7 | (SEQ ID NO: 350) | (SEQ ID NO: 351) | (SEQ ID NO: 352) |
| S1-RBD-R3- | SSNIGSNP | DNN | EAWDDSLSGPV |
| T1-C8 | (SEQ ID NO: 353) | (SEQ ID NO: 354) | (SEQ ID NO: 355) |
| S1-RBD-R3- | SSNIGGNS | RNN | AAWDDSLNGWV |
| T1-D7 | (SEQ ID NO: 356) | (SEQ ID NO: 357) | (SEQ ID NO: 358) |
| RBD-R3-E1- | SGSIASNY | EDN | QSYDPNNHGVV |
| F5 | (SEQ ID NO: 359) | (SEQ ID NO: 360) | (SEQ ID NO: 361) |
| Ab_13 | SGSIASNY | EDN | QSYDSSNLWV |
| | (SEQ ID NO: 802) | (SEQ ID NO: 803) | (SEQ ID NO: 804) |
| Ab_14 | SSDVGAYNF | DFN | SSYAGSNNFDVV |
| | (SEQ ID NO: 805) | (SEQ ID NO: 806) | (SEQ ID NO: 807) |
| Ab_15 | SGTIASNY | EDN | QSYDTSNHYV |
| | (SEQ ID NO: 808) | (SEQ ID NO: 809) | (SEQ ID NO: 810) |
| Ab_16 | SSNIGAGYD | GTN | QSYDNSLTDPYV |
| | (SEQ ID NO: 811) | (SEQ ID NO: 812) | (SEQ ID NO: 813) |
| Ab_17 | SSDVGGSKY | DVT | AAWDDSLNGVV |
| | (SEQ ID NO: 814) | (SEQ ID NO: 815) | (SEQ ID NO: 816) |
| Ab_18 | SGSIANNF | EDN | QSYDSSNLV |
| | (SEQ ID NO: 817) | (SEQ ID NO: 818) | (SEQ ID NO: 819) |
| Ab_19 | SANIGSNA | GNT | AAWDDSLNGYV |
| | (SEQ ID NO: 820) | (SEQ ID NO: 821) | (SEQ ID NO: 822) |
| Ab_20 | SGSIASNY | EDN | QSYDSSNHWV |
| | (SEQ ID NO: 823) | (SEQ ID NO: 824) | (SEQ ID NO: 825) |
| Ab_21 | SSDVGGYDY | DVS | SSYTSSSPVV |
| | (SEQ ID NO: 826) | (SEQ ID NO: 827) | (SEQ ID NO: 828) |
| Ab_22 | TGSIAGNY | DDN | QSYDSGNRGV |
| | (SEQ ID NO: 829) | (SEQ ID NO: 830) | (SEQ ID NO: 831) |
| Ab_23 | SRDIGAYGY | EVR | SSYTSSSTLDVV |
| | (SEQ ID NO: 832) | (SEQ ID NO: 833) | (SEQ ID NO: 834) |
| Ab_24 | SSNIGRNA | SNN | SAWDTSLSTWV |
| | (SEQ ID NO: 835) | (SEQ ID NO: 836) | (SEQ ID NO: 837) |
| Ab_25 | SGSIASNY | EDN | QSYDSSNHWV |
| | (SEQ ID NO: 838) | (SEQ ID NO: 839) | (SEQ ID NO: 840) |
| Ab_26 | NIRTKG | YAS | QVWDSSSDLVV |
| | (SEQ ID NO: 841) | (SEQ ID NO: 842) | (SEQ ID NO: 843) |
| Ab_27 | SSDVGTYNR | EVS | SSYTRTFTYV |
| | (SEQ ID NO: 844) | (SEQ ID NO: 845) | (SEQ ID NO: 846) |
| Ab_28 | GGSIASNY | EDN | QSYDSSNPVV |
| | (SEQ ID NO: 847) | (SEQ ID NO: 848) | (SEQ ID NO: 849) |
| Ab_38 | QSVSSN | DVS | QQRGAWPLT |
| | (SEQ ID NO: 986) | (SEQ ID NO: 987) | (SEQ ID NO: 988) |
| WCS2-T4-E7 | SGDIATRH | ESN | QSYDSTNPWV |
| | (SEQ ID NO: 1219) | (SEQ ID NO: 1258) | (SEQ ID NO: 1285) |
| wcS2-E1-A9 | SSDVGAYNY | EVS | SSYAGTRKYYV |
| | (SEQ ID NO: 275) | (SEQ ID NO: 252) | (SEQ ID NO: 1286) |
| wcS2-T4-H8 | QIVTNNN | GAS | QQYYYWPLS |
| | (SEQ ID NO: 1220) | (SEQ ID NO: 1259) | (SEQ ID NO: 1287) |
| wcS2-T3-F5 | SSDVGGYKY | DVS | SSFSQTNSYV |
| | (SEQ ID NO: 320) | (SEQ ID NO: 306) | (SEQ ID NO: 1288) |
| wcS2-E2-C1 | SSDVGRYKY | EVN | SSYAGSNNPYV |
| | (SEQ ID NO: 1221) | (SEQ ID NO: 1260) | (SEQ ID NO: 1289) |
| wcS2-T4-C9 | QNVPSNS | GAS | QLYDRSSQLA |
| | (SEQ ID NO: 1222) | (SEQ ID NO: 1259) | (SEQ ID NO: 1290) |
| wcS2-T3-B9 | SLGTYY | GKN | NSRNNSGYHE |
| | (SEQ ID NO: 1223) | (SEQ ID NO: 318) | (SEQ ID NO: 1291) |
| wcS2-E3-C8 | QSNIGSNT | VNN | SSYAGSNDYV |
| | (SEQ ID NO: 1224) | (SEQ ID NO: 1261) | (SEQ ID NO: 1292) |
| wcS2-T4-F8 | SGSIASNY | GDN | QSFDGSYHWV |
| | (SEQ ID NO: 230) | (SEQ ID NO: 1262) | (SEQ ID NO: 1293) |
| wcS2-T3-F1 | SSNIGSNT | SNN | ATWDDGLSGRV |
| | (SEQ ID NO: 227) | (SEQ ID NO: 228) | (SEQ ID NO: 1294) |
| wcS2-E2-B1 | SLRSYY | GKN | NSRDSSGNHLRV |
| | (SEQ ID NO: 269) | (SEQ ID NO: 318) | (SEQ ID NO: 1295) |
| wcS2-T2-G3 | SNNVGNQG | RNN | SAWDNSLGAWV |
| | (SEQ ID NO: 278) | (SEQ ID NO: 357) | (SEQ ID NO: 1296) |
| wcS2-T1-A6 | QSNIGSNT | VNN | SSYAGSNDYV |
| | (SEQ ID NO: 1224) | (SEQ ID NO: 1261) | (SEQ ID NO: 1292) |
| wcS2-T4-D4 | SGDIATRH | ESN | LTYDITNPWV |
| | (SEQ ID NO: 1219) | (SEQ ID NO: 1258) | (SEQ ID NO: 1297) |
| wcS2-T2-D10 | SGDIATKH | DND | SYDDSTNPCV |
| | (SEQ ID NO: 1225) | (SEQ ID NO: 1263) | (SEQ ID NO: 1298) |
| wcS2-T1-G9 | QSISSSY | DAS | QQRGNWPLT |
| | (SEQ ID NO: 1226) | (SEQ ID NO: 1264) | (SEQ ID NO: 1299) |
| wcS2-E3-H7 | QNVPSNS | GAS | QLYDRSSQLA |
| | (SEQ ID NO: 1222) | (SEQ ID NO: 1259) | (SEQ ID NO: 1290) |
| wcS2-T2-C11 | SLTIFF | KDT | QSADTSGTLKV |
| | (SEQ ID NO: 1227) | (SEQ ID NO: 1265) | (SEQ ID NO: 1300) |
| SARS2-R3- | SSDLGGHNF (SEQ | GVN (SEQ ID NO: | SSYEATHIYV (SEQ ID |
| G2-P1- | ID NO: 1228) | 1266) | NO: 1301) |
| H9_PelB- | | | |
| F_2020_Jun. | | | |
| 19_D08 | | | |
| SARS2-R3- | SSDVGSYNL (SEQ | EVS (SEQ ID NO: | SSFSSGSIPYV (SEQ ID |
| G3-P1- | ID NO: 1229) | 252) | NO: 1302) |
| F8_PelB- | | | |
| F_2020_Jun. | | | |
| 19_F11 | | | |
| SARS2-R3- | QSVSTN (SEQ ID | GAS (SEQ ID NO: | QHYANWPRT (SEQ ID |
| G2-P1- | NO: 1230) | 1259) | NO: 1303) |
| B4_PelB- | | | |
| F_2020_Jun. | | | |
| 19_B02 | | | |
| SARS2-R3- | SSNIGSNT (SEQ ID | SNN (SEQ ID NO: | ATWDDSLNGPV (SEQ |
| G3-P1- | NO: 227) | 228) | ID NO: 1304) |
| B2_PelB- | | | |
| F_2020_Jun. | | | |
| 19_A08 | | | |
| SARS2-R3- | NIGSKS (SEQ ID | DDT (SEQ ID NO: | QVWDTSSDHPYV |
| G3-P1- | NO: 287) | 1267) | (SEQ ID NO: 1305) |
| B3_PelB- | | | |
| F_2020_Jun. | | | |
| 19_B08 | | | |
| SARS2-R3- | SLRSYY (SEQ ID | GGN (SEQ ID NO: | SSRATSAFYV (SEQ ID |
| G1-P3- | NO: 269) | 1268) | NO: 1306) |
| E8_PelB- | | | |
| F_2020_Jun. | | | |
| 19_H04 | | | |
| SARS2-R3- | SSNIGAGYD (SEQ | GNS (SEQ ID NO: | QSYDSSLSGWV (SEQ |
| G1-P2- | ID NO: 811) | 1269) | ID NO: 1307) |
| D7_PelB- | | | |
| F_2020_Jun. | | | |
| 19_H09 | | | |
| SARS2-R3- | ALPNRY (SEQ ID | KDS (SEQ ID NO: | QSVNTIGTYV (SEQ ID |
| G1-P1- | NO: 1231) | 1270) | NO: 1308) |
| C6_PelB- | | | |
| F_2020_Jun. | | | |
| 19_H02 | | | |
| SARS2-R3-T- | SSDLVGHKF (SEQ | EIN (SEQ ID NO: | TCYDEDHIYV (SEQ ID |
| P2-E12_PelB- | ID NO: 1232) | 1271) | NO: 1309) |
| F_2020_Jun. | | | |
| 19_D07 | | | |
| SARS2-R3- | ENVNNW (SEQ ID | KAS (SEQ ID NO: | QQYKSYS (SEQ ID |
| G2-P1- | NO: 1233) | 1272) | NO: 1310) |
| D12_PelB- | | | |
| F_2020_Jun. | | | |
| 19_H04 | | | |
| SARS2-R3- | SGSIASNY (SEQ ID | AHN (SEQ ID NO: | HSYDTNNPVV (SEQ ID |
| G1-P2- | NO: 230) | 1273) | NO: 1311) |
| E8_PelB- | | | |
| F_2020_Jun. | | | |
| 19_E10 | | | |
| SARS2-R3- | QSVRSN (SEQ ID | GVS (SEQ ID NO: | QHYGSSPLYT (SEQ ID |
| G1-P1- | NO: 1234) | 1274) | NO: 1312) |
| A10_PelB- | | | |
| F_2020_Jun. | | | |
| 19_H01 | | | |
| SARS2-R3- | SSDVGSYNR (SEQ | EVS (SEQ ID NO: | SSYTSSSPYV (SEQ ID |
| G1-P3- | ID NO: 1235) | 252) | NO: 1313) |
| B5_PelB- | | | |
| F_2020_Jun. | | | |
| 19_D02 | | | |
| SARS2-R3- | IGDIARNY (SEQ | EDD (SEQ ID NO: | QSYDTTIV (SEQ ID |
| G3-P1- | ID NO: 1236) | 1275) | NO: 1314) |
| A2_PelB- | | | |
| F_2020_Jun. | | | |
| 19_B07 | | | |
| SARS2-R3- | SSNIGAGYH (SEQ | GNQ (SEQ ID NO: | SAWDDSLGGEV (SEQ |
| G3-P1- | ID NO: 1237) | 1276) | ID NO: 1315) |
| D1_PelB- | | | |
| F_2020_Jun. | | | |
| 19_G09 | | | |
| SARS2-R3- | SNNVGHEG (SEQ | KND (SEQ ID NO: | SAWDSSLGSWV (SEQ |
| G1-P2- | ID NO: 1238) | 1277) | ID NO: 1316) |
| D4_PelB- | | | |
| F_2020_Jun. | | | |
| 19_G09 | | | |
| SARS2-R3- | RSNIGSNT (SEQ ID | SNN (SEQ ID NO: | QSYDSSVV (SEQ ID |
| G1-P1- | NO: 1239) | 228) | NO: 1317) |
| B6_PelB- | | | |
| F_2020_Jun. | | | |
| 19_E02 | | | |
| SARS2-R3- | NLGEIY (SEQ ID | QDK (SEQ ID NO: | QAWDSSTGV (SEQ ID |
| G3-P1- | NO: 1240) | 237) | NO: 1318) |
| G8_PelB- | | | |
| F_2020_Jun. | | | |
| 25_A05 | | | |
| SARS2-R3- | ALPDKY (SEQ ID | KDS (SEQ ID NO: | QSADSSGTWV (SEQ |
| G1-P1- | NO: 1241) | 1270) | ID NO: 1319) |
| F11_PelB- | | | |
| F_2020_Jun. | | | |
| 25_B05 | | | |
| SARS2-R3- | SSDVGGYNH (SEQ | DVS (SEQ ID NO: | TSY AGSNSLV (SEQ ID |
| T1-P3- | ID NO: 1242) | 306) | NO: 1320) |
| F4_PelB- | | | |
| F_2020_Jun. | | | |
| 20_C03 | | | |
| SARS2-R3- | SGDVGGYNS (SEQ | EVT (SEQ ID NO: | SSYAGSNNYV (SEQ ID |
| G1-P2- | ID NO: 1243) | 1278) | NO: 1321) |
| B8_PelB- | | | |
| F_2020_Jun. | | | |
| 25_C06 | | | |
| SARS2-R3- | SGSIASNY (SEQ ID | EDN (SEQ ID NO: | QSYDSPWV (SEQ ID |
| G1-P2- | NO: 230) | 231) | NO: 1322) |
| D3_PelB- | | | |
| F_2020_Jun. | | | |
| 25_C12 | | | |
| SARS2-R3- | SSNIGSNT (SEQ ID | SNN (SEQ ID NO: | AVWDDSLNGLV (SEQ |
| G1-P4- | NO: 227) | 228) | ID NO: 1323) |
| C5_PelB- | | | |
| F_2020_Jun. | | | |
| 25_C07 | | | |
| SARS2-R3- | SNNVGHEG (SEQ | RNK (SEQ ID NO: | SAWDGRLNGYL (SEQ |
| G1-P2- | ID NO: 1238) | 1279) | ID NO: 1324) |
| D6_PelB- | | | |
| F_2020_Jun. | | | |
| 25_D02 | | | |
| SARS2-R3- | KLEDKF (SEQ ID | EDA (SEQ ID NO: | QAWAITTEV (SEQ ID |
| G1-P1- | NO: 1244) | 1280) | NO: 1325) |
| B7_PelB- | | | |
| F_2020_Jun. | | | |
| 25_A03 | | | |
| 95_PelB- | QSVSSTY (SEQ ID | GAS (SEQ ID NO: | QHSYRTPYT (SEQ ID |
| F_2020_Jun. | NO: 1245) | 1259) | NO: 1326) |
| 25_G11 | | | |
| 73_PelB- | QSVRDGY (SEQ ID | GAS (SEQ ID NO: | QQRSNWPPT (SEQ ID |
| F_2020_Jun. | NO: 1246) | 1259) | NO: 1327) |
| 25_F09 | | | |
| SARS2-R3- | SDDVGGFAH (SEQ | DVS (SEQ ID NO: | SSYAGRNGVI (SEQ ID |
| G3-P1- | ID NO: 1247) | 306) | NO: 1328) |
| G9_PelB- | | | |
| F_2020_Jun. | | | |
| 25_B05 | | | |
| SARS2-R3- | SNNVGDQG (SEQ | RNN (SEQ ID NO: | SAWDSSLSAQV (SEQ |
| G1-P3- | ID NO: 1248) | 357) | ID NO: 1329) |
| G7_PelB- | | | |
| F_2020_Jun. | | | |
| 25_H01 | | | |
| SARS2-R3- | SGSIASNY (SEQ ID | EDN (SEQ ID NO: | QSYDNNNHVV (SEQ |
| G1-P4- | NO: 230) | 231) | ID NO: 1330) |
| A2_PelB- | | | |
| F_2020_Jun. | | | |
| 25_A06 | | | |
| SARS2-R3- | SSNIGAGYD (SEQ | GNS (SEQ ID NO: | QSYDSSLSGWV (SEQ |
| G3-P1- | ID NO: 811) | 1269) | ID NO: 1307) |
| G1_PelB- | | | |
| F_2020_Jun. | | | |
| 25_F04 | | | |
| SARS2-R3- | SSDLGGHNF (SEQ | DVY (SEQ ID NO: | SSYAGSNPYV (SEQ ID |
| G3-P1- | ID NO: 1228) | 1281) | NO: 1331) |
| F1_PelB- | | | |
| F_2020_Jun. | | | |
| 25_C04 | | | |
| SARS2-R3- | RSNIGINS (SEQ ID | RNN (SEQ ID NO: | AAWDGSLNGPL (SEQ |
| G1-P3- | NO: 1249) | 357) | ID NO: 1332) |
| H10_PelB- | | | |
| F_2020_Jun. | | | |
| 25_H10 | | | |
| 85_PelB- | SSNIGNYG (SEQ | SNN (SEQ ID NO: | AAWDDSLKGV (SEQ |
| F_2020_Jun. | ID NO: 1250) | 228) | ID NO: 1333) |
| 25_G10 | | | |
| SARS2-R3- | TSNIGRNK (SEQ | LNN (SEQ ID NO: | AAWDDSLTGYV (SEQ |
| G1-P4- | ID NO: 1251) | 1282) | ID NO: 250) |
| A3_PelB- | | | |
| F_2020_Jun. | | | |
| 25_B06 | | | |
| SARS2-R3- | SLSRYY (SEQ ID | GKD (SEQ ID NO: | NSRDSSGNL (SEQ ID |
| G1-P3- | NO: 1252) | 1283) | NO: 1334) |
| H6_PelB- | | | |
| F_2020_Jun. | | | |
| 25_H08 | | | |
| SARS2-R3- | SSDVGGYNY (SEQ | DVN (SEQ ID NO: | SSYTSSSTYV (SEQ ID |
| G3-P1- | ID NO: 251) | 321) | NO: 313) |
| G5_PelB- | | | |
| F_2020_Jun. | | | |
| 25_H04 | | | |
| SARS2-R3- | GLPKHY (SEQ ID | KDT (SEQ ID NO: | QSGDTSGPVV (SEQ ID |
| G1-P4- | NO: 1253) | 1265) | NO: 1335) |
| C10_PelB- | | | |
| F_2020_Jun. | | | |
| 25_F07 | | | |
| SARS2-R3- | SSNIGRGYN (SEQ | GNS (SEQ ID NO: | SAWDDSLNNVV (SEQ |
| G1-P1- | ID NO: 1254) | 1269) | ID NO: 1336) |
| F10_PelB- | | | |
| F_2020_Jun. | | | |
| 25_B04 | | | |
| SARS2-R3- | NIGHKG (SEQ ID | DDS (SEQ ID NO: | QVWESYGDHVV (SEQ |
| T1-P4- | NO: 1255) | 255) | ID NO: 1337) |
| H4_PelB- | | | |
| F_2020_Jun. | | | |
| 20_H04 | | | |
| SARS2-R3- | QSLLHSNGYNY | FGS (SEQ ID NO: | MQVLQTPPIT (SEQ ID |
| G2-P1- | (SEQ ID NO: 1256) | 1284) | NO: 1338) |
| E8_PelB- | | | |
| F_2020_Jun. | | | |
| 25_A02 | | | |
| SARS2-R3- | TSNIGAGYD (SEQ | DNN (SEQ ID NO: | QSYDSGLDGSV (SEQ |
| G1-P1- | ID NO: 1257) | 354) | ID NO: 1339) |
| C3_PelB- | | | |
| F_2020_Jun. | | | |
| 25_A07 | | | |
| SARS2-R3- | SSDVGGYNH (SEQ | DVS (SEQ ID NO: | TSYAGSNSLV (SEQ ID |
| G3-P1- | ID NO: 1242) | 306) | NO: 1320) |
| G2_PelB- | | | |
| F_2020_Jun. | | | |
| 25_G04 | | | |
| SARS2-R3- | SGSIASNY (SEQ ID | EDD (SEQ ID NO: | QSYDNNNAVI (SEQ ID |
| G1-P4- | NO: 230) | 1275) | NO: 1340) |
| D1_PelB- | | | |
| F_2020_Jun. | | | |
| 25_A08 | | | |

[0273] The amino acid sequences of the heavy and light chain framework regions of the COVID-19 antibodies are shown in Table 64A-B below:

TABLE 64A
Heavy chain (V_{H}) framework regions (FRs) of the COVID-19 antibodies.

| Seq ID | FR1-IMGT | FR2-IMGT | FR3-IMGT | FR4-IMGT |
|---|---|---|---|---|
| S1-R3- | EVQLVESGPGV | WNWIRQPPGKPL | NKNPSLK.SRVTIS | WSRGTL |
| T1-H7 | VSPSATLFLTCS | EWIGF | SDTSKNEFSLTLT | VTVSS |
| (Ab12) | VS | (SEQ ID NO: 363) | SVTAADTAVYYC | (SEQ ID |
| | (SEQ ID NO: 362) | | (SEQ ID NO: 364) | NO: 365) |
| RBD-R3- | EVQLVESGPGL | WSWIRQPAGKG | NYNPSLKSRVTM | WGQGTL |
| E1-G7 | VKPSETLSLTCT | LEWIGR | SVDTSKNQFSLKL | VTVSS |
| (Ab2-10) | VS | (SEQ ID NO: 367) | SSVTAADTAVYY | (SEQ ID |
| | (SEQ ID NO: 366) | | C | NO: 369) |
| | | | (SEQ ID NO: 368) | |
| S1-RBD- | EVQLVESGPGL | WNWIR*PPGKPL | NKNPSLKSRVSIS | WSRGTL |
| R3-E1- | VKPSATLFLTCS | EWIGF | SDPSKNEFSLTLT | VTVSS |
| D8 | VS | (SEQ ID NO: 371) | SVTAADTAVYYC | (SEQ ID |
| (Ab_3) | (SEQ ID NO: 370) | | (SEQ ID NO: 372) | NO: 373) |
| S1-RBD- | QVQLQQSGPGL | WNWIRQSPSRGL | DYAVSVKSRITIN | WGQGTT |
| R3-T1- | VKPSQTLSLTCA | EWLGR | PDTSKNQFSLQLS | VTVSS |
| C7 | IS | (SEQ ID NO: 375) | SVTPEDTAVYYC | (SEQ ID |
| | (SEQ ID NO: 374) | | (SEQ ID NO: 376) | NO: 377) |
| RBD-R3- | QVQLVQSGGGV | MHWVRQAPGK | YYADSVKGRFTIS | WGQGTT |
| T1-F4 | VQPGRSLRLSC | GLEWLAV | RDKSKNTLYLQIN | VTVSS |
| (Ab2-2) | AAS | (SEQ ID NO: 379) | SLRAEDTAVYYC | (SEQ ID |
| | (SEQ ID NO: 378) | | (SEQ ID NO: 380) | NO: 381) |
| RBD-R3- | QVQLVQSGG.G | IHWVRQAPGKG | YYGDSVKGRFTIS | WGQGTT |
| E1-A5 | VVQPGKSLRLS | LEWVGV | RDNAKNSLYLQM | VTVSS |
| | CTAS | (SEQ ID NO: 383) | NSLRVEDTAVYY | (SEQ ID |
| | (SEQ ID NO: 382) | | C | NO: 385) |
| | | | (SEQ ID NO: 384) | |
| S1-RBD- | QVTLKESGPTR | VGWIRQPPGKAL | RYSPSLKSRLTIT | WGQGTT |
| R3-T1- | VKPTQTLTLTCT | EWLAL | KDTSKNQVVLTM | VTVSS |
| F5 | FS | (SEQ ID NO: 387) | TNMDPVDTATYY | (SEQ ID |
| (Ab2-7) | (SEQ ID NO: 386) | | C | NO: 389) |
| | | | (SEQ ID NO: 388) | |
| S1-R3- | QVQLVQSGGGV | MHWVRQAPGK | NYADFVEGRFTIS | WGQGTL |
| T1-A12 | VQPGRSLRLSC | GLEWVAV | RDNSKNTLYLQM | VTVSS |
| (Ab_5) | AAS | (SEQ ID NO: 391) | NSLRPEDTGVYY | (SEQ ID |
| | (SEQ ID NO: 390) | | C | NO: 393) |
| | | | (SEQ ID NO: 392) | |
| S1-R3- | QVQLVQSGGGL | MHWVRQAPGK | PYADSVKGRFTIS | WGQGTL |
| T1-A6 | VQPGRSLRLSC | GLEWVAA | RDNAKNSLYLQM | VTVSS |
| (Ab_4) | AAS | (SEQ ID NO: 395) | NSLRDEDTAVYY | (SEQ ID |
| | (SEQ ID NO: 394) | | C | NO: 397) |
| | | | (SEQ ID NO: 396) | |
| S1-RBD- | QVQLVQSGAEV | IHWVRQAPGQG | NFAQRFQGRVTM | WGQGTL |
| R3-T1- | KKPGASVKFSC | LEWMGW | TTDTSVSTAYMD | VTVSS |
| A5 | KAS | (SEQ ID NO: 399) | LRRLRSDDTAVY | (SEQ ID |
| | (SEQ ID NO: 398) | | YC | NO: 401) |
| | | | (SEQ ID NO: 400) | |
| S1-RBD- | QVHLVQSGGGV | MHWVRQAPGK | YYAESVKGRFTIS | WGQGTM |
| R3-T1- | VQPGRSLRLSC | GLEWVAL | RDNSKNTLYLQM | VTVSS |
| B3 | AAS | (SEQ ID NO: 403) | NSLRAEDTAVYY | (SEQ ID |
| (Ab_1) | (SEQ ID NO: 402) | | C | NO: 405) |
| | | | (SEQ ID NO: 404) | |
| S1-RBD- | QVQLVQSGTEV | LHWVRQAPGQG | NYAQKFQGRVTL | WGQGTL |
| R3-T1- | KKPGASVKVSC | LEWMGW | TRDTSISTAYMEL | VTVSS |
| E7 | KAS | (SEQ ID NO: 407) | SGLRSDDTAVYY | (SEQ ID |
| | (SEQ ID NO: 406) | | C | NO: 409) |
| | | | (SEQ ID NO: 408) | |
| S1-RBD- | QVTLKESGPTL | VSWIRQPPGKAL | FYSTALKTRLTIS | WGRGTL |
| R3-T1- | VKPTQTLTLTCT | EWLAR | KDTSKNQVVFTM | VTVSS |
| F9 | LS | (SEQ ID NO: 411) | TSMDPVDTATYY | (SEQ ID |
| | (SEQ ID NO: 410) | | C | NO: 413) |
| | | | (SEQ ID NO: 412) | |
| S1-R3- | QVQLVQSGGGV | FHWVRQAPGKG | LYADSVKGRFTIS | WGQGTT |
| T1-C2 | VQPGRSLRLSC | LQWVAV | RDDSQNMLYLEM | VTVSS |
| (Ab_6) | AAS | (SEQ ID NO: 415) | HSLRLEDTAVYY | (SEQ ID |
| | (SEQ ID NO: 414) | | C | NO: 417) |
| | | | (SEQ ID NO: 416) | |
| RBD-R3- | QVQLVQSGAEV | IGWVRQMPGKG | RYSPSFQGQVTIS | WGQGTL |
| E1-B3 | KKPGESLKISCK | LEWMGI | ADKSISTAYLQW | VTVSS |
| | GS | (SEQ ID NO: 419) | SSLKASDTAMYY | (SEQ ID |
| | (SEQ ID NO: 418) | | C | NO: 421) |
| | | | (SEQ ID NO: 420) | |
| RBD-R3- | QVQL*QSGPGL | WSWIRQSPSRGL | DFAQSVRSRIVIN | WGQGTL |
| T1-B5 | VKASQTLSLTC | EWLAR | PDTSKNHVYLQL | VTVSS |
| | VIS | (SEQ ID NO: 423) | RSVTPEDTAVYY | (SEQ ID |
| | (SEQ ID NO: 422) | | C | NO: 425) |
| | | | (SEQ ID NO: 424) | |
| RBD-R3- | EVQLVQSGAEV | ISWVRQAPGQGL | NYAQKLQGRVT | WGKGTL |
| T1-H3 | KKPGSSVKVSC | EWMGW | MTTDTSTSTAYM | VTVSS |
| (Ab_2) | KTS | (SEQ ID NO: 427) | ELRSLRSDDTAV | (SEQ ID |
| | (SEQ ID NO: 426) | | YYC | NO: 429) |
| | | | (SEQ ID NO: 428) | |
| S1-R3- | QVQLVQSGAEV | ISWLRQAPGQGL | NYAQKFQGRVT | WGQGTL |
| T1-C4 | KKPGSSVKVSC | EWMGW | MTRDTSISTAYM | VTVSS |
| (Ab_8) | KAS | (SEQ ID NO: 431) | ELSRLRSDDTAV | (SEQ ID |
| | (SEQ ID NO: 430) | | YYC | NO: 433) |
| | | | (SEQ ID NO: 432) | |
| S1-RBD- | QVQLVQSGAEV | ISWVRQAPGQGL | NYAQKFQDRVAI | WGQGTL |
| R3-T1- | KKPGSSVKVSC | EWMGG | TADKSTSTAYME | VTVSS |
| B12 | KAS | (SEQ ID NO: 435) | LSSLRSEDTAVYY | (SEQ ID |
| | (SEQ ID NO: 434) | | C | NO: 437) |
| | | | (SEQ ID NO: 436) | |
| S1-RBD- | QVQLVQSGGGL | MSWVRQAPGKG | YYVDSVKGRFTIS | WGQGTT |
| R3-T1- | VQPGGSLRLSC | LEWVAN | RDNAKNSLYLQM | VTVSS |
| G5 5 | AAS | (SEQ ID NO: 439) | NSLRAEDTAVYY | (SEQ ID |
| | (SEQ ID NO: 438) | | C | NO: 441) |
| | | | (SEQ ID NO: 440) | |
| S1-RBD- | QVQLVQSGGGL | MHWVRQVPGK | GYADSVKGRFTIS | WGQGTM |
| R3-T1- | VQPGRSLRLSC | GLEWVSG | RDNAKNSLYLQM | VTVSS |
| E2 (Ab7) | AAS | (SEQ ID NO: 443) | NSLRAEDTALYY | (SEQ ID |
| | (SEQ ID NO: 442) | | C | NO: 445) |
| | | | (SEQ ID NO: 444) | |
| RBD-R3- | QVQLVQSGGGL | MHWVRQVPGK | GYADSVKGRFTIS | WGQGTT |
| T1-F7 | VQPGRSLRLSC | GLEWVSG | RDNVKNSLYLQM | VTVSS |
| | AAS | (SEQ ID NO: 447) | TSLRAEDTAVYF | (SEQ ID |
| | (SEQ ID NO: 446) | | C | NO: 449) |
| | | | (SEQ ID NO: 448) | |
| S1-RBD- | EVQLVQSGAEV | IGWVRQMPGKG | KYSPSFQGQVTIS | WGQGTL |
| R3-T1- | KKPGESLRISCK | LEWMGS | ADRSISTAYLQWS | VTVSS |
| G1 | AS | (SEQ ID NO: 451) | GLKASDTAMYYC | (SEQ ID |
| | (SEQ ID NO: 450) | | (SEQ ID NO: 452) | NO: 453) |
| S1-RBD- | EVQLVQSGAEV | ISWVRQAPGQGL | KYAQKLQGRVT | WGQGTL |
| R3-T1- | KKPGASVKVSC | EWMGW | MTTDTSTSTAYM | VTVSS |
| C2 | KAS | (SEQ ID NO: 455) | ELRSLRSDDTAV | (SEQ ID |
| | (SEQ ID NO: 454) | | YYC | NO: 457) |
| | | | (SEQ ID NO: 456) | |
| S1-RBD- | EVQLVQSGAEV | ISWVRQAPGQGL | RYAQKFQGRVTL | WGQGTM |
| R3-T1- | EKPGSSVKVSC | EWMGW | TIDTSSSTAYMEL | VTVSS |
| H8 | KAS | (SEQ ID NO: 459) | SSLRSEDTAVYYC | (SEQ ID |
| | (SEQ ID NO: 458) | | (SEQ ID NO: 460) | NO: 461) |
| S1-RBD- | QVQLVQSGAEV | ISWVRQAPGQGL | NYAQKLQGRVT | WGQGTL |
| R3-E1- | KKPGASVKVSC | EWMGW | MTTDTSTSTAYM | VTVSS |
| E8 | KAS | (SEQ ID NO: 463) | EVRSLRSDDTAV | (SEQ ID |
| | (SEQ ID NO: 462) | | YYC | NO: 465) |
| | | | (SEQ ID NO: 464) | |
| RBD-R3- | QVTLKESGPTL | VGWIRQPPGKAL | RYSPSLRSRLTITR | WGQGTL |
| T1-H2 | VKPTQTLTLTCT | EWLAL | DTSKNQVVLTVT | VTVSS |
| | FS | (SEQ ID NO: 467) | DMDPADTGTYYC | (SEQ ID |
| | (SEQ ID NO: 466) | | (SEQ ID NO: 468) | NO: 469) |
| S1-RBD- | QVTLKESGPAL | VSWIRQSPGKAL | YYTTSLKTRLTIT | WGQGTL |
| R3-T1- | VKSTQTLTLTCT | EWLAL | KDTSKNQVVLTM | VTVSS |
| B7 | IS | (SEQ ID NO: 471) | TSMDPLDTATYY | (SEQ ID |
| | (SEQ ID NO: 470) | | C | NO: 473) |
| | | | (SEQ ID NO: 472) | |
| S1-RBD- | QVQLVQSGGGL | MTWFRQAPGKG | KYADSVKGRFTIS | WGQGTL |
| R3-E1- | VKPGGSLRLSC | LEWISY | RDNAKNSLYLQM | VTVSS |
| E5 | AAS | (SEQ ID NO: 475) | DSLRAEDTAVYY | (SEQ ID |
| | (SEQ ID NO: 474) | | C | NO: 477) |
| | | | (SEQ ID NO: 476) | |
| S1-R3- | QVQLVQSGGGV | VHWVRQAPGKG | YYADSVKGRFTL | WGHGTL |
| T1-H6 | VQPGKSLRLSC | LEWVAV | SRDNSKNTVYLQ | VTVSS |
| | AAS | (SEQ ID NO: 479) | LSSLRREDTAVY | (SEQ ID |
| | (SEQ ID NO: 478) | | YC | NO: 481) |
| | | | (SEQ ID NO: 480) | |
| S1-RBD- | QVQLVQSGGGV | MHWVRQAPGK | YYADSVKGRFTIS | WGQGTM |
| R3-E1- | VQPGRSLRLSC | GLEYVSA | RDNGKNSLYLQM | VTVSS |
| C6 | AAS | (SEQ ID NO: 483) | SSLRAEDTAVYY | (SEQ ID |
| | (SEQ ID NO: 482) | | C | NO: 485) |
| | | | (SEQ ID NO: 484) | |
| S1-RBD- | QVQLVQSGGGL | MSWVRQAPGKG | YYVDSVKGRFTIS | WGQGTT |
| R3-E1- | VQPGGSLRLSC | LEWVAN | RDNAKNSLYLQM | VTVSS |
| F2 | AAS | (SEQ ID NO: 487) | NGLRAEDTAVYY | (SEQ ID |
| | (SEQ ID NO: 486) | | C | NO: 489) |
| | | | (SEQ ID NO: 488) | |
| S1-RBD- | QVQLVQSGGGL | MHWVRQVPGK | GYADSVKGRFTIS | WGQGTM |
| R3-T1- | VQPGRSLRLSC | GLEWVSG | RDNAKNSLYLQM | VTVSS |
| C3 | AAS | (SEQ ID NO: 491) | NSLRAEDTALYY | (SEQ ID |
| | (SEQ ID NO: 490) | | C | NO: 493) |
| | | | (SEQ ID NO: 492) | |
| S1-RBD- | QVQLVQSGGGL | MHWVRQAPGK | GYVDSVKGRFTIS | WGLGTL |
| R3-T1- | VQPGGSLRLSC | GLEWVSG | RDNRNNKVYLQ | VTVSS |
| G12 | ATS | (SEQ ID NO: 495) | MNNLRAEDTAVY | (SEQ ID |
| | (SEQ ID NO: 494) | | YC | NO: 497) |
| | | | (SEQ ID NO: 496) | |
| S1-RBD- | EVQLVESGPGL | WSWVRQPPGKG | NYNPSLKSRVTIS | WGQGTM |
| R3-E1- | VKPSGTLSLTCA | LEWIGE | VDTSKNQFSLKLS | VTVSS |
| F1 | VS | (SEQ ID NO: 499) | SVTAADTAVYYC | (SEQ ID |
| | (SEQ ID NO: 498) | | (SEQ ID NO: 500) | NO: 501) |
| S1-RBD- | QVTLKESGPGL | WSWIRQSPGKGL | IYNPSLKSRLTMSI | WGQGTL |
| R3-E1- | VNPSETLSLTCT | EWIGY | DTSKNQLSLNLRS | VTVSS |
| H8 | VS | (SEQ ID NO: 503) | LTAADTAVYYC | (SEQ ID |
| | (SEQ ID NO: 502) | | (SEQ ID NO: 504) | NO: 505) |
| S1-RBD- | EVQLVESGPGL | WNWIRQTPGKP | NKNPPLLSRVSISS | WSGGTL |
| R3-T1- | MKPSETLFLSCS | LEWMGI | DPSNNEFSLTLTS | ATVSS |
| F1 | VS | (SEQ ID NO: 507) | VTAADTAVYYC | (SEQ ID |
| | (SEQ ID NO: 506) | | (SEQ ID NO: 508) | NO: 509) |
| S1-R3- | EVQLVESGPGL | WNWIRQAPGKP | NKNPSLKSRVTIS | WSRGTL |
| T1-B10 | VSPSATLFLTCS | LEWMGV | SETSDNKFSLTLT | GTVSS |
| | VS | (SEQ ID NO: 511) | SVTAEDTAVYYC | (SEQ ID |
| | (SEQ ID NO: 510) | | (SEQ ID NO: 512) | NO: 513) |
| RBD-R3- | EVQLVESGPGV | WNWIRQPPGKPL | NKNPSLKSRVTIS | WSRGTL |
| E1-D12 | VSPSATLFLTCS | EWIGV | SKTSDNKFSLTLT | GTVSS |
| | VS | (SEQ ID NO: 515) | SVTAEDTAVYYC | (SEQ ID |
| | (SEQ ID NO: 514) | | (SEQ ID NO: 516) | NO: 517) |
| RBD-R3- | EVQLVESGPGV | WNWIRQAPGKA | NNNPSLKSRVTIS | WSRGTL |
| T1-C5 | VSPSATLFLTCS | LEWIGF | SDTSKNEFSLTLT | VTVSS |
| | VS | (SEQ ID NO: 519) | SVTAADTAVYYC | (SEQ ID |
| | (SEQ ID NO: 518) | | (SEQ ID NO: 520) | NO: 521) |
| S1-RBD- | QVQLVQSGAEV | IGWVRQMPGKG | RYSPSFQGQVTIS | WGQGTM |
| R3-T1- | KKPGESLKISCK | LEWMGI | ADKSISTAYLQW | VTVSS |
| B4 | GS | (SEQ ID NO: 523) | SSLKASDTAMYY | (SEQ ID |
| | (SEQ ID NO: 522) | | C | NO: 525) |
| | | | (SEQ ID NO: 524) | |
| S1-RBD- | QVQLVQSGAEV | IAWVRQMPGKG | RYSPSLQGQVTIS | WGQGTT |
| R3-E1- | KKPGNSLKISCK | LEWLGS | VDKSLSTAYLQW | VTVSS |
| E7 | GS | (SEQ ID NO: 527) | RSLKASDTAMYY | (SEQ ID |
| | (SEQ ID NO: 526) | | C | NO: 529) |
| | | | (SEQ ID NO: 528) | |
| S1-RBD- | EVQLVQSGAEV | IGWVRQMPGKG | RYSPSFQGQVTIS | WGQGTL |
| R3-T1- | KKPGESLKISCK | LEWMGI | ADKSISTAYLQW | VTVSS |
| C8 | GS | (SEQ ID NO: 531) | SSLKASDTAMYY | (SEQ ID |
| | (SEQ ID NO: 530) | | C | NO: 533) |
| | | | (SEQ ID NO: 532) | |
| S1-RBD- | QVQLVQSGVEV | IGWVRQMPGKG | RYSPSFQGQVTIS | WGQGTL |
| R3-T1- | KKPGESLKISCK | LEWMGI | ADKSISTAYLQW | VTVSS |
| D7 | GS | (SEQ ID NO: 535) | SSLKASDTAMYY | (SEQ ID |
| | (SEQ ID NO: 534) | | C | NO: 537) |
| | | | (SEQ ID NO: 536) | |
| RBD-R3- | QVQLQQSGPGL | WNWIRQSPSRGL | DYAVSVKSRVTI | WGQGTL |
| E1-F5 | VKPSQTLSLTCA | EWLGR | NADTSKNQLSLQ | VTVSS |
| | IF | (SEQ ID NO: 539) | LNSVTPEDTAVY | (SEQ ID |
| | (SEQ ID NO: 538) | | YC | NO: 541) |
| | | | (SEQ ID NO: 540) | |
| Ab_13 | QVTLKESGPKL | VGWIRQPPGKAL | RYSPSLKSRLTIA | WGQGTM |
| | VKPTQTLTLTCT | EWLAL | KDTSKYQVVLTM | VTVSA |
| | FS | (SEQ ID NO: 851) | TNMDPVDTATYY | (SEQ ID |
| | (SEQ ID NO: 850) | | C | NO: 853) |
| | | | (SEQ ID NO: 852) | |
| Ab_14 | QVQLQQSGPGL | WNWIRQSPARG | DYAISMKSRITINP | WGQGTL |
| | VKPSQTLSLTCA | LEWLGR | DTSKNQFSLQLES | VTVSS |
| | IS | (SEQ ID NO: 855) | VTPEDTAVYYC | (SEQ ID |
| | (SEQ ID NO: 854) | | (SEQ ID NO: 856) | NO: 857) |
| Ab_15 | QVQLVQSGGGL | MSWFRQAPGKG | GYAASVKGRFTIS | WGKGTT |
| | VKPGRSLRLSCT | LEWVGF | RDDSKSIAYLQM | VTVSS |
| | AS | (SEQ ID NO: 859) | NSLKTEDTAVYY | (SEQ ID |
| | (SEQ ID NO: 858) | | C | NO: 861) |
| | | | (SEQ ID NO: 860) | |
| Ab_16 | QVQLVQSGGGV | MHWVRQAPGK | DYADSVKGRFTV | WGQGTL |
| | VQPGRSLRLSC | GLEWVAL | SRDNSKNTLYLQ | VTVSS |
| | AAS | (SEQ ID NO: 863) | MNSLRPEDTAVY | (SEQ ID |
| | (SEQ ID NO: 862) | | FC | NO: 865) |
| | | | (SEQ ID NO: 864) | |
| Ab_17 | QVQLVQSGGGV | MHWVRQVPGK | GYADSVKGRFTIS | WGQGTT |
| | VQPGRSLRLSC | GLEWVSG | RDNVKNSLYLQM | VTVSS |
| | AAS | (SEQ ID NO: 867) | NSLRTEDSALYY | (SEQ ID |
| | (SEQ ID NO: 866) | | C | NO: 869) |
| | | | (SEQ ID NO: 868) | |
| Ab_18 | EVQLVQSGGGV | MHWVRQAPGK | YYADSVEGRFTIS | WGQGTL |
| | VQPGRSLRVSC | GLEWVAF | RDNSRNTVSLEM | VTVSS |
| | AAS | (SEQ ID NO: 871) | NSLRGEDTAVYY | (SEQ ID |
| | (SEQ ID NO: 870) | | C | NO: 873) |
| | | | (SEQ ID NO: 872) | |
| Ab_19 | EVQLVESGAEV | IGWVRQMPGKG | RYSPSFQGQVTIS | WGQGTM |
| | KKPGESLKISCK | LEWMGI | ADKSISTAYLQW | VTVSS |
| | GS | (SEQ ID NO: 875) | SSLKASDTAMYY | (SEQ ID |
| | (SEQ ID NO: 874) | | C | NO: 877) |
| | | | (SEQ ID NO: 876) | |
| Ab_20 | QVQLVQSGGGS | MHWVRQAPGK | YYVDSVKGRFTIS | WGQGTL |
| | VKPGGSLRLSC | GLEWVAN | RDNAKNSLYLQM | VTVSS |
| | AAS | (SEQ ID NO: 879) | NSLRAEDTAVYY | (SEQ ID |
| | (SEQ ID NO: 878) | | C | NO: 881) |
| | | | (SEQ ID NO: 880) | |
| Ab_21 | QVQLVQSGGGL | MHWVRQAPGK | GYVDSVKGRFTIS | WGLGTL |
| | VQPGGSLRLSC | GLEWVSG | RDNRNNKVYLQ | VTVSS |
| | ATS | (SEQ ID NO: 883) | MNNLRAEDTAVY | (SEQ ID |
| | (SEQ ID NO: 882) | | YC | NO: 885) |
| | | | (SEQ ID NO: 884) | |
| Ab_22 | QVQLVQSGGGV | MHWVRQAPGK | YYADSVKGRFTIS | WGQGTT |
| | VQPGRSLRLSC | GLEWLAV | RDKSKNTLYLQIN | VTVSS |
| | AAS | (SEQ ID NO: 887) | SLRAEDTAVYYC | (SEQ ID |
| | (SEQ ID NO: 886) | | (SEQ ID NO: 888) | NO: 889) |
| Ab_23 | EVQLVQSGAEV | ITWVRQAPGQGL | NYAQKFQGRVTI | WGQGTL |
| | KKPGSSVKVSC | EWMGR | TADTSVSTAWME | VTVSS |
| | RSS | (SEQ ID NO: 891) | LSSLESDDTAIYY | (SEQ ID |
| | (SEQ ID NO: 890) | | C | NO: 893) |
| | | | (SEQ ID NO: 892) | |
| Ab_24 | QVQLVQSGAEV | VSWVRQAPGQG | NYAQKFQGRITIT | WGQGTL |
| | KTPGSSVKVSC | LEWMGG | ADEATSTVYMAL | VTVSS |
| | KAS | (SEQ ID NO: 895) | SSLRSEDTAMYY | (SEQ ID |
| | (SEQ ID NO: 894) | | C | NO: 897) |
| | | | (SEQ ID NO: 896) | |
| Ab_25 | QVQLVQSGGGL | MSWVRQAPGKG | YYVDSVKGRFTIS | WGQGTT |
| | VQPGGSLRLSC | LEWVAN | RDNAKNSLYLQM | VTVSS |
| | AAS | (SEQ ID NO: 899) | NSLRAEDTAVYY | (SEQ ID |
| | (SEQ ID NO: 898) | | C | NO: 901) |
| | | | (SEQ ID NO: 900) | |
| Ab_26 | QVQLVQSGGGL | MHWVRQVPGK | GYADSVKGRFTIS | WGQGTM |
| | VQPGRSLRLSC | GLEWVSG | RDNAKNSLYLQM | VTVSS |
| | AAS | (SEQ ID NO: 903) | NSLRAEDTALYY | (SEQ ID |
| | (SEQ ID NO: 902) | | C | NO: 905) |
| | | | (SEQ ID NO: 904) | |
| Ab_27 | QVQLVQSGTEV | LHWVRQAPGQG | NYAQKFQGRVTL | WGQGTL |
| | KKPGASVKVSC | LEWMGW | TRDTSISTAYMEL | VTVSS |
| | KAS | (SEQ ID NO: 907) | SGLRSDDTAVYY | (SEQ ID |
| | (SEQ ID NO: 906) | | C | NO: 909) |
| | | | (SEQ ID NO: 908) | |
| Ab_28 | QVTLKESGPGL | WSWIRQSPGKGL | IYNPSLKSRLTMSI | WGQGTL |
| | VNPSETLSLTCT | EWIGY | DTSKNQLSLNLRS | VTVSS |
| | VS | (SEQ ID NO: 911) | LTAADTAVYYC | (SEQ ID |
| | (SEQ ID NO: 910) | | (SEQ ID NO: 912) | NO: 913) |
| Ab_38 | QVTLKESGPTL | VGWIRQPPGKAL | RYSPSLRSRLTITR | WGQGTL |
| | VKPTQTLTLTCT | EWLAL | DTSKNQVVLTVT | VTVSS |
| | FS | (SEQ ID NO: 990) | DMDPADTGTYYC | (SEQ ID |
| | (SEQ ID NO: 989) | | (SEQ ID NO: 991) | NO: 992) |
| wcS2- | EVQLVQSGGGV | MHWVRQAPGK | YYADSVKGRFTIS | WGQGTT |
| T4-E7 | VQPGRSLRLSC | GLEWVAV | RDNSKNTLYLQM | VTVSS |
| | AAS | (SEQ ID NO: 391) | NSLRAEDTAVYY | (SEQ ID |
| | (SEQ ID NO: | | C | NO: 377) |
| | 1341) | | (SEQ ID NO: 1385) | |
| wcS2- | QVQLV*SGGGL | MHWVRQAPGK | GYADSVKGRFTIS | WGQGTL |
| E1-A9 | VQPGRSLRLSC | GLEWVSG | RDNAKNSLYLQM | VTVSS |
| | AAS | (SEQ ID NO: 495) | DSLRAEDTAVYY | (SEQ ID |
| | (SEQ ID NO: 394) | | C | NO: 369) |
| | | | (SEQ ID NO: 1386) | |
| wcS2- | QV*LVQSGGGV | MHWVRQAPGK | YYADSVKGRFTIS | WGQGTL |
| T4-H8 | VQPGRSLRLSC | GLEWVAV | RDNSKNTLYLQM | VTVSS |
| | AAS | (SEQ ID NO: 391) | NSLRAEDTAVYY | (SEQ ID |
| | (SEQ ID NO: 378) | | C | NO: 369) |
| | | | (SEQ ID NO: 1385) | |
| wcS2- | QVQLVQSGGGV | MHWVRQAPGK | YYADSVKGRFTIS | WGQGTL |
| T3-F5 | VQPGRSLRLSC | GLEWVAV | RDNAKNSLYLQM | VTVSS |
| | AAS | (SEQ ID NO: 391) | NSLRDEDTAVYY | (SEQ ID |
| | (SEQ ID NO: 378) | | 40 | NO: 369) |
| | | | (SEQ ID NO: 1387) | |
| wcS2- | EVQLVQSGGGV | MHWVRQAPGK | YYADSVKGRFTIS | WGQGTL |
| E2-C1 | VQPGRSLRLSC | GLEWVAV | RDNSKNTLYLQM | VTVSS |
| | AAS | (SEQ ID NO: 391) | NSLRAEDTAVYY | (SEQ ID |
| | (SEQ ID NO: | | C | NO: 369) |
| | 1341) | | (SEQ ID NO: 1385) | |
| wcS2- | QVQLVQSGGGV | MHWVRQAPGK | YYADSVKGRFTIS | WGQGTL |
| T4-C9 | VQPGRSLRLSC | GLEWVAV | RDNSKNTLYLQM | VTVSS |
| | AAS | (SEQ ID NO: 391) | NSLRAEDTAVYY | (SEQ ID |
| | (SEQ ID NO: 378) | | C | NO: 369) |
| | | | (SEQ ID NO: 1385) | |
| wcS2- | QVQLVQSGGGV | MHWVRQAPGK | YYADSVKGRFTIS | WGQGTL |
| T3-B9 | VQPGRSLRLSC | GLEWVAV | RDNSKNTLYLQM | VTVSS |
| | AAS | (SEQ ID NO: 391) | NSLRAEDTAVYY | (SEQ ID |
| | (SEQ ID NO: 378) | | C | NO: 369) |
| | | | (SEQ ID NO: 1385) | |
| wcS2- | QV*LVQSGAEV | IAWVRQLPGQGL | RYSPSFQGQVTIS | WGQGTT |
| E3-C8 | KKPGESLKISCK | EWMGI | ADKSINTAYLQW | VTVSS |
| | GS | (SEQ ID NO: 1362) | SRLKASDTAKYY | (SEQ ID |
| | (SEQ ID NO: 418) | | C | NO: 377) |
| | | | (SEQ ID NO: 1388) | |
| wcS2- | QVELVQSGAEV | MHWVRQAPGQ | KYAEKFQGWVT | WGQGTM |
| T4-F8 | KEPGASVKVSC | GLEWMGW | MTRDTSISTAYM | VTVSS |
| | KDS | (SEQ ID NO: 1363) | ELSRLKSDDTALY | (SEQ ID |
| | (SEQ ID NO: | | YC | NO: 405) |
| | 1342) | | (SEQ ID NO: 1389) | |
| wcS2- | EVQLVQSGGGV | MHWVRQAPGK | YYADSVKGRFTIS | WGQGTL |
| T3-F1 | VQPGRSLRLSC | GLEWVAV | RDNSKNTLYLQM | VTVSS |
| | AAS | (SEQ ID NO: 391) | NSLRAEDTAVYY | (SEQ ID |
| | (SEQ ID NO: | | C | NO: 369) |
| | 1341) | | (SEQ ID NO: 1385) | |
| wcS2- | QVQLVQSGGGV | MHWVRQAPGK | YYADSVKGRFTIS | WGKGTL |
| E2-B1 | VQPGRSLRLSC | GLEWVAV | RDNSKNTLYLQM | VTVSS |
| | AAS | (SEQ ID NO: 391) | NSLRAEDTAVYY | (SEQ ID |
| | (SEQ ID NO: 378) | | C | NO: 429) |
| | | | (SEQ ID NO: 1385) | |
| wcS2- | QVQLQESGGGV | MHWVRQAPGK | YYADSVKGRFTIS | WGQGTL |
| T2-G3 | VQPGRSLRLSC | GLEWVAV | RDNSKNTLYLQM | VTVSS |
| | AAS | (SEQ ID NO: 391) | NSLRAEDTAVYY | (SEQ ID |
| | (SEQ ID NO: | | C | NO: 369) |
| | 1343) | | (SEQ ID NO: 1385) | |
| wcS2- | QV*LVQSGAEV | IAWVRQLPGQGL | RYSPSFQGQVTIS | WGQGTT |
| T1-A6 | KKPGESLKISCK | EWMGI | ADKSINTAYLQW | VTVSS |
| | GS | (SEQ ID NO: 1362) | SRLKASDTAKYY | (SEQ ID |
| | (SEQ ID NO: 418) | | C | NO: 377) |
| | | | (SEQ ID NO: 1388) | |
| wcS2- | EV*LVQSGGGV | MHWVRQAPGK | YYADSVKGRFTIS | WGQGTT |
| T4-D4 | VQPGRSLRLSC | GLEWVAV | RDNSKNTLYLQM | ATASS |
| | AAS | (SEQ ID NO: 391) | NSLRAEDTAVYY | (SEQ ID |
| | (SEQ ID NO: | | C | NO: 1416) |
| | 1341) | | (SEQ ID NO: 1385) | |
| wcS2- | EVQLVQSGGGV | MHWVRQAPGK | YYADSVKGRFTIS | WGQGTL |
| T2-D10 | VQPGRSLRLSC | GLEWVAV | RDNSKNTLYLQM | VTVSS |
| | AAS | (SEQ ID NO: 391) | NSLRAEDTAVYY | (SEQ ID |
| | (SEQ ID NO: | | C | NO: 369) |
| | 1341) | | (SEQ ID NO: 1385) | |
| wcS2- | QVQLVQSGGGV | MHWVRQAPGK | YYADSVKGRFTIS | WGQGTL |
| T1-G9 | VQPGRSLRLSC | GLEWVAV | RDNSKNTLYLQM | VTVSS |
| | AAS | (SEQ ID NO: 391) | NSLRAEDTAVYY | (SEQ ID |
| | (SEQ ID NO: 378) | | C | NO: 369) |
| | | | (SEQ ID NO: 1385) | |
| wcS2- | QVQLVQSGGGV | MHWVRQAPGK | YYADSVKGRFTIS | WGQGTL |
| E3-H7 | VQPGRSLRLSC | GLEWVAG | RDNSKNTLYLQM | VTVSS |
| | AAS | (SEQ ID NO: 1364) | NSLRAEDTAVYY | (SEQ ID |
| | (SEQ ID NO: 378) | | C | NO: 369) |
| | | | (SEQ ID NO: 1385) | |
| wcS2- | QVTLKESGPTL | VGWIRQPPGKAL | RYSPSLKSRLTISK | WGQGTM |
| T2-C11 | VKPTQTLTLTCT | EWLAL | DTSRNQVVLTMT | VTVSS |
| | FS | (SEQ ID NO: 387) | NMDPADTGTYYC | (SEQ ID |
| | (SEQ ID NO: 466) | | (SEQ ID NO: 1390) | NO: 405) |
| SARS2- | QVQLVQSGGGL | MHWVRQAPGK | YYADSVQGRITIS | WGQGTL |
| R3-G2- | VKPGGSLRLSCS | GLEWVAV (SEQ | RDNSKNTLYLQM | VTVSS |
| P1- | AS (SEQ ID NO: | ID NO: 391) | NSLRAEDTAVYF | (SEQ ID |
| H9_PelB- | 1345) | | C (SEQ ID NO: | NO: 369) |
| F_2020 | | | 1391) | |
| Jun. | | | | |
| 19_D08 | | | | |
| SARS2- | QVQLVQSGGGV | MHWVRQAPGK | YYADSVKGRFTIS | WGQGTL |
| R3-G3- | VQPGRSLRLSC | GLEWVAV (SEQ | RDNSKNTLYLQM | VTVSS |
| P1- | AAS (SEQ ID | ID NO: 391) | NSLRAEDTAVYY | (SEQ ID |
| F8_PelB- | NO: 378) | | C (SEQ ID NO: | NO: 369) |
| F_2020 | | | 1385) | |
| Jun. | | | | |
| 19_F11 | | | | |
| SARS2- | QVQLVQSGGGV | MHWVRQAPGK | YYADSVKGRFTIS | WGQGTL |
| R3-G2- | VQPGRSLRLSC | GLEWVAV (SEQ | RDNSKNTLYLQM | VTVSS |
| P1- | AAS (SEQ ID | ID NO: 391) | NSLRTEDTAVYY | (SEQ ID |
| B4_PelB- | NO: 378) | | C (SEQ ID NO: | NO: 369) |
| F_2020 | | | 1392) | |
| Jun. | | | | |
| 19_B02 | | | | |
| SARS2- | QVQLVQSGGGV | MHWVRQAPGK | YYADSVKGRFTIS | WGQGTT |
| R3-G3- | VQPGRSLRLSC | GLEWVAV (SEQ | RDNSKNTLYLQM | VTVSS |
| P1- | AAS (SEQ ID | ID NO: 391) | NSLRAEDTAVYY | (SEQ ID |
| B2_PelB- | NO: 378) | | C (SEQ ID NO: | NO: 377) |
| F_2020 | | | 1385) | |
| Jun. | | | | |
| 19_A08 | | | | |
| SARS2- | QVQLQESGGGV | MHWVRQAPGK | YYADSVKGRFTIS | WGQGTM |
| R3-G3- | VQPGRALRLSC | GLEWVAV (SEQ | RDNSKNTLYLQM | VTVSS |
| P1- | RAS (SEQ ID | ID NO: 391) | NSLRAEDTAVYY | (SEQ ID |
| B3_PelB- | NO: 1346) | | C (SEQ ID NO: | NO: 405) |
| F_2020 | | | 1385) | |
| Jun. | | | | |
| 19_B08 | | | | |
| SARS2- | *VQLVQSGAEV | ISWVRQAPGQG | NYAQKFQGRVTI | WGQGTM |
| R3-G1- | KKPGSSVKVSC | LEWMGG (SEQ | TADKSTSTAYME | VTVSS |
| P3- | KAS (SEQ ID | ID NO: 435) | LSSLRSEDTAVYY | (SEQ ID |
| E8_PelB- | NO: 430) | | C (SEQ ID NO: | NO: 405) |
| F_2020 | | | 1393) | |
| Jun. | | | | |
| 19_H04 | | | | |
| SARS2- | EVQLVQSGAEV | ISWVRQAPGQG | NYAQKLQGRVT | WGQGTT |
| R3-G1- | KKPGASVKVSC | LEWMGW (SEQ | MTTNTSTNTAYM | VTVSS |
| P2- | KAS (SEQ ID | ID NO: 427) | ELRSLRSDDTAG | (SEQ ID |
| D7_PelB- | NO: 454) | | YYW (SEQ ID NO: | NO: 377) |
| F_2020 | | | 1394) | |
| Jun. | | | | |
| 19_H09 | | | | |
| SARS2- | QVTLKESGPTL | VGWIRQPPGKA | RYSPSLKSRLTIT | WGQGTL |
| R3-G1- | VKPTQTLTLTCT | LEWLAL (SEQ | KDTSKNQVVLTM | VTVSS |
| P1- | FS (SEQ ID NO: | ID NO: 387) | TNMDPVDTATYY | (SEQ ID |
| C6_PelB- | 466) | | C (SEQ ID NO: | NO: 369) |
| F_2020 | | | 388) | |
| Jun. | | | | |
| 19_H02 | | | | |
| SARS2- | QVQLVQSGGGL | MHWVRQAPGK | YYAYSVQGRFTIS | RGRGTPG |
| R3-T-P2- | VQPGGSLRLSCS | GLEWVEV (SEQ | KNNSKNTLYLQM | TASS |
| E12 PelB- | AS (SEQ ID NO: | ID NO: 1365) | NSLKAEDTAVYF | (SEQ ID |
| F_2020 | 1347) | | C (SEQ ID NO: | NO: 1417) |
| Jun. | | | 1395) | |
| 19_D07 | | | | |
| SARS2- | QVQLVQSGGGV | MHWVRQAPGK | YYADSVKGRFTIS | WGQGTM |
| R3-G2- | VQPGRSLRLSC | GLEWVAV (SEQ | RDNSKNTLYLQM | VTVSS |
| P1- | AAS (SEQ ID | ID NO: 391) | NSLRVEDTAVYY | (SEQ ID |
| D12 PelB- | NO: 378) | | C (SEQ ID NO: | NO: 405) |
| F_2020 | | | 1396) | |
| Jun. | | | | |
| 19_H04 | | | | |
| SARS2- | EVQLVQSGGGV | MHWVRQAPGK | YYADSVKGRFTIS | WGQGTL |
| R3-G1- | VQPGRSLRLSC | GLEWVAV (SEQ | RDNSKNTLYLQM | VTVSS |
| P2- | AAS (SEQ ID | ID NO: 391) | NSLRAEDTAVYY | (SEQ ID |
| E8_PelB- | NO: 1341) | | C (SEQ ID NO: | NO: 369) |
| F_2020 | | | 1385) | |
| Jun. | | | | |
| 19_E10 | | | | |
| SARS2- | EVQLVQSGGGV | MHWVRQAPGK | YYADSVKGRFTIS | WGQGTT |
| R3-G1- | VQPGRSLTLSCA | GLEWVAV (SEQ | RDNSKNTLYLQM | VTVSS |
| P1- | AS (SEQ ID NO: | ID NO: 391) | NSLRAEDTAVYY | (SEQ ID |
| A10 PelB- | 1348) | | C (SEQ ID NO: | NO: 377) |
| F_2020 | | | 1385) | |
| Jun. | | | | |
| 19_H01 | | | | |
| SARS2- | QVQLVQSGGGV | MHWVRQAPGK | YYADSVKGRFTIS | WGQGTL |
| R3-G1- | VQPGRSLRLSC | GLEWVAL (SEQ | RDNAKNSLYLQM | VTVSS |
| P3- | AAS (SEQ ID | ID NO: 403) | NSLRAEDTAVYY | (SEQ ID |
| B5_PelB- | NO: 378) | | C (SEQ ID NO: | NO: 369) |
| F_2020 | | | 1397) | |
| Jun. | | | | |
| 19_D02 | | | | |
| SARS2- | QVQLVQSGTEV | ISWVRQAPGQG | NYAQKFQGRVTI | WGQGTT |
| R3-G3- | RQPGASVKVSC | LEWMGG (SEQ | TADESTSTAYME | VTVSS |
| P1- | KAS (SEQ ID | ID NO: 435) | LSSLRSEDTAVYY | (SEQ ID |
| A2_PelB- | NO: 1349) | | C (SEQ ID NO: | NO: 377) |
| F_2020 | | | 1398) | |
| Jun. | | | | |
| 19_B07 | | | | |
| SARS2- | EVQLVQSGGGV | MHWVRQAPGK | YYADSVKGRFTIS | WGKGTL |
| R3-G3- | VQPGRSLRLSC | GLEWVAV (SEQ | RDNSKNTLYLQM | VTVSS |
| P1- | AAS (SEQ ID | ID NO: 391) | NSLRAEDTAVYY | (SEQ ID |
| D1_PelB- | NO: 1341) | | C (SEQ ID NO: | NO: 429) |
| F_2020 | | | 1385) | |
| Jun. | | | | |
| 19_G09 | | | | |
| SARS2- | QVQLVQSGGGV | LHWVRQAPGKG | YYADSVKGRFTIS | WGQGTM |
| R3-G1- | VRPGRSLRLSCA | LEWVAV (SEQ | RDNAKNSLYLQM | VTVSS |
| P2- | AS (SEQ ID NO: | ID NO: 1366) | NSLRAEDTAVYY | (SEQ ID |
| D4_PelB- | 1350) | | C (SEQ ID NO: | NO: 405) |
| F_2020 | | | 1397) | |
| Jun. | | | | |
| 19_G09 | | | | |
| SARS2- | EVQLVQSGGGV | MHWVRQAPGK | YYADSVKGRFTIS | WGQGTL |
| R3-G1- | VQPGRSLRLSC | GLEWVAV (SEQ | RDNSKNTLYLQM | VTVSS |
| P1- | AAS (SEQ ID | ID NO: 391) | NSLRAEDTAIYYC | (SEQ ID |
| B6_PelB- | NO: 1341) | | (SEQ ID NO: 1399) | NO: 369) |
| F_2020 | | | | |
| Jun. | | | | |
| 19_E02 | | | | |
| SARS2- | QVTLKESGPAL | VGWIRQPPGKAL | RYSPSLKSRLTIT | WGQGTL |
| R3-G3- | VKPTQTLTLTCT | EWLAL (SEQ ID | KDTSKNQVVLTM | VTVSS |
| P1- | FS (SEQ ID NO: | NO: 387) | TNMDPVDTATYY | (SEQ ID |
| G8_PelB- | 1351) | | C (SEQ ID NO: | NO: 369) |
| F_2020 | | | 388) | |
| Jun. | | | | |
| 25_A05 | | | | |
| SARS2- | QVTLKESGPTL | VGWIRQPPGKAL | RYSPSLKSRLTIT | WGQGTT |
| R3-G1- | VKPTQTLTLTCT | EWLAL (SEQ ID | KDTSKNQVVLTM | VTVSS |
| P1- | LS (SEQ ID NO: | NO: 387) | TNMDPVDTATYY | (SEQ ID |
| F11_PelB- | 410) | | C (SEQ ID NO: | NO: 377) |
| F_2020 | | | 388) | |
| Jun. | | | | |
| 25_B05 | | | | |
| SARS2- | QVQLVQSGGGV | MHWVRQAPGK | HYADSVKGRFTIS | WGQGTL |
| R3-T1- | VQPGRSRRLSCT | GLEWVST (SEQ | RDNSKNTLYLQM | VTVSS |
| P3- | AS (SEQ ID NO: | ID NO: 1367) | KSLRAEDTATYY | (SEQ ID |
| F4_PelB- | 1352) | | C (SEQ ID NO: | NO: 369) |
| F_2020 | | | 1400) | |
| Jun. | | | | |
| 20_C03 | | | | |
| SARS2- | QVQLVQSGGGL | MSWVRQAPGKG | YYADSVKGRFTIS | WGQGTL |
| R3-G1- | VQPGGSLRLSC | LEWVSA (SEQ | RDNSKNTLYLQM | VTVSS |
| P2- | AAS (SEQ ID | ID NO: 1368) | NSLRAEDTGVYY | (SEQ ID |
| B8_PelB- | NO: 438) | | C (SEQ ID NO: | NO: 369) |
| F_2020 | | | 1401) | |
| Jun. | | | | |
| 25_C06 | | | | |
| SARS2- | QVQLVQSGGGV | MHWVRQAPGK | YYADSVKGRFTIS | WGQGTL |
| R3-G1- | VQPGRSLRLSC | GLEWVAV (SEQ | RDNSKNTLYLQM | VTVSS |
| P2- | AAS (SEQ ID | ID NO: 391) | NSLRAEDTAVYY | (SEQ ID |
| D3_PelB- | NO: 378) | | C (SEQ ID NO: | NO: 369) |
| F_2020 | | | 1385) | |
| Jun. | | | | |
| 25_C12 | | | | |
| SARS2- | EVQLVQSGGGV | MHWVRQAPGK | YYADSVKGRFTIS | WGQGTL |
| R3-G1- | VQPGRSLRLSC | GLEWVSY (SEQ | RDNAKNSLYLQM | VTVSS |
| P4- | AAS (SEQ ID | ID NO: 1369) | NSLRAEDTAVYY | (SEQ ID |
| C5_PelB- | NO: 1341) | | C (SEQ ID NO: | NO: 369) |
| F_2020 | | | 1397) | |
| Jun. | | | | |
| 25_C07 | | | | |
| SARS2- | QVQLVQSGAEV | FSWVRQAPGQG | DYAQNFQGRVT | WGQGTL |
| R3-G1- | KKPGASVKVSC | LEWMGW (SEQ | MTTDTSTNTAYM | VTVSS |
| P2- | KAS (SEQ ID | ID NO: 1370) | ELRSLRSDDTAV | (SEQ ID |
| D6_PelB- | NO: 462) | | YYC (SEQ ID NO: | NO: 369) |
| F_2020 | | | 1402) | |
| Jun. | | | | |
| 25_D02 | | | | |
| SARS2- | EVQLVQSGAEV | MHWVRQAPGQ | SYAQKFQGRVTM | WGQGTT |
| R3-G1- | KKPGASVKVSC | GLEWMGI (SEQ | TRDTSTSTVYME | VTVSS |
| P1- | KAS (SEQ ID | ID NO: 1371) | LSSLRSEDTAVYY | (SEQ ID |
| B7_PelB- | NO: 454) | | C (SEQ ID NO: | NO: 377) |
| F_2020 | | | 1403) | |
| Jun. | | | | |
| 25_A03 | | | | |
| 95_PelB- | QVQLVQSGGGV | MHWVRQAPGK | YYADSVKGRFTIS | WGQGTT |
| F_2020 | VQPGRSLRLSC | GLEWVAV (SEQ | RDNSKKMLYLQ | VTVSS |
| Jun. | AAS (SEQ ID | ID NO: 391) | MNSLTAEDTAVY | (SEQ ID |
| 25_G11 | NO: 378) | | YC (SEQ ID NO: | NO: 377) |
| | | | 1404) | |
| 73_PelB- | QVQLVQSGGGL | MNWVRQAPGK | YYADSVKGRFTIS | WGQGTL |
| F_2020 | VQPGGSLRLSC | GLEWVAV (SEQ | RDNSKNTLYLQM | VTVSS |
| Jun. | AAS (SEQ ID | ID NO: 1372) | NSLRAEDTAVYY | (SEQ ID |
| 25_F09 | NO: 438) | | C (SEQ ID NO: | NO: 369) |
| | | | 1385) | |
| SARS2- | QVQLVQSGGGL | MHWVRQAPGK | YYADSVKGRFTIS | WGQGTL |
| R3-G3- | VKPGGSLRLSC | GLEWVAV (SEQ | RDNSKNTLYLQM | VTVSS |
| P1- | AAS (SEQ ID | ID NO: 391) | NSLRAEDTAVYY | (SEQ ID |
| G9_PelB- | NO: 474) | | C (SEQ ID NO: | NO: 369) |
| F_2020 | | | 1385) | |
| Jun. | | | | |
| 25_B05 | | | | |
| SARS2- | QVQLVQSGAEV | MHWVRQAPGQ | NYAQKFQGRVT | WGQGTT |
| R3-G1- | KKPGASVKVSC | GLEWMGR (SEQ | MTRDTSISTAYM | VTVSS |
| P3- | KAS (SEQ ID | ID NO: 1373) | ELSRLRSDDTAV | (SEQ ID |
| G7_PelB- | NO: 462) | | YYC (SEQ ID NO: | NO: 377) |
| F_2020 | | | 432) | |
| Jun. | | | | |
| 25_H01 | | | | |
| SARS2- | QVQLQQSGAEV | VSWVRQAPGQG | NYAQRFQGRVTI | WGKGTT |
| R3-G1- | KKPGSSVKVSC | PEWMGR (SEQ | TADESTNTAYME | VTVSS |
| P4- | KAS (SEQ ID | ID NO: 1374) | LSSLRSEDTAVYY | (SEQ ID |
| A2_PelB- | NO: 1353) | | C (SEQ ID NO: | NO: 861) |
| F_2020 | | | 1405) | |
| Jun. | | | | |
| 25_A06 | | | | |
| SARS2- | EVQLVQSGAEV | ISWVRQAPGQGL | NYAQKLQGRVT | WGQGTT |
| R3-G3- | KKPGASVKVSC | EWMGW (SEQ ID | MTTDTSTSTAYM | VTVSS |
| P1- | KAS (SEQ ID | NO: 427) | ELRSLRSDDTAV | (SEQ ID |
| G1_PelB- | NO: 454) | | YYC (SEQ ID NO: | NO: 377) |
| F_2020 | | | 428) | |
| Jun. | | | | |
| 25_F04 | | | | |
| SARS2- | QVQLVQSGGGV | MHWVRQAPGK | YYADSVKGRFTIS | WGQGTL |
| R3-G3- | VQPGRSLRLSC | GLEWVAV (SEQ | RDNSKNTLYLQM | VTVSS |
| P1- | AAS (SEQ ID | ID NO: 391) | NSLRDEDTAVYY | (SEQ ID |
| F1_PelB- | NO: 378) | | C (SEQ ID NO: | NO: 369) |
| F_2020 | | | 1406) | |
| Jun. | | | | |
| 25_C04 | | | | |
| SARS2- | QVQLQESGAGL | WSWIRQPPGKGL | NYNPSFQSRVAM | WGQGTL |
| R3-G1- | LRPSETLSLTCA | EWIGE (SEQ ID | SRDTPKNQFSLKL | VTVSS |
| P3- | VY (SEQ ID NO: | NO: 1375) | SSVTAADTAVYY | (SEQ ID |
| H10 PelB- | 1354) | | C (SEQ ID NO: | NO: 369) |
| F_2020 | | | 1407) | |
| Jun. | | | | |
| 25_H10 | | | | |
| 85_PelB- | QVQLV*SGAEV | VGWVRQKPGKG | RKNPSFEGQVTM | WGQGTL |
| F_2020 | KKPGESLKISCQ | LEWMGI (SEQ ID | SVDKSLHSVYLH | GTVSS |
| Jun. | GS (SEQ ID NO: | NO: 1376) | WTSLKVSDTAKY | (SEQ ID |
| 25_G10 | 1355) | | YC (SEQ ID NO: | NO: 1418) |
| | | | 1408) | |
| SARS2- | QVQLVQSGAEV | INWVRQATGQG | GYAQSFQGRVTF | WGQGTT |
| R3-G1- | KKPGASVKVSC | LEWMGW (SEQ | TRDTSINTAYMEL | VTVSS |
| P4- | KAS (SEQ ID | ID NO: 1377) | SSLRSEDTAVYYC | (SEQ ID |
| A3_PelB- | NO: 462) | | (SEQ ID NO: 1409) | NO: 377) |
| F_2020 | | | | |
| Jun. | | | | |
| 25_B06 | | | | |
| SARS2- | QVQLVQSGAEV | ISWVRQMPGKG | NYSPSFQGHVTIT | WGQGTM |
| R3-G1- | KKSGESLEISCK | LEWMGR (SEQ | VDKSTGAAYLH | VTVSS |
| P3- | GS (SEQ ID NO: | ID NO: 1378) | WSSLKASDTGMY | (SEQ ID |
| H6_PelB- | 1356) | | YC (SEQ ID NO: | NO: 405) |
| F_2020 | | | 1410) | |
| Jun. | | | | |
| 25_H08 | | | | |
| SARS2- | EVQLVQSGAEV | IGWVRQMPGKG | IYSPSFQGQVTISA | WGQGTM |
| R3-G3- | KKPGESLRISCK | LEWMGV (SEQ | DKSISTAYLQWSS | VTVSS |
| P1- | GS (SEQ ID NO: | ID NO: 1379) | LKASDTAIYYC | (SEQ ID |
| G5_PelB- | 1357) | | (SEQ ID NO: 1411) | NO: 405) |
| F_2020 | | | | |
| Jun. | | | | |
| 25_H04 | | | | |
| SARS2- | EVQLVESGGGQ | MHWVRQAPGK | YYADSLKGRFNIS | WGHGTL |
| R3-G1- | VKPGGSLRISCA | GLEWVSS (SEQ | RDNAKKLLYLQL | VTVSS |
| P4- | AS (SEQ ID NO: | ID NO: 1380) | SSLSAEDTALYFC | (SEQ ID |
| C10 PelB- | 1358) | | (SEQ ID NO: 1412) | NO: 481) |
| F_2020 | | | | |
| Jun. | | | | |
| 25_F07 | | | | |
| SARS2- | QVQLVQSGAEV | ISWVRQAPGQGL | NYAQKLQGRVT | WGQGTL |
| R3-G1- | KKPGSSVKVSC | ELMGW (SEQ ID | MTTDTSTSTAYM | VTVSS |
| P1- | KAS (SEQ ID | NO: 1381) | ELRSLRSGDTAV | (SEQ ID |
| F10 PelB- | NO: 430) | | YYC (SEQ ID NO: | NO: 369) |
| F_2020 | | | 1413) | |
| Jun. | | | | |
| 25_B04 | | | | |
| SARS2- | EVQLVESGPGL | WSWIRQHPGKG | YYNPSLKSRVTIS | WGQGTM |
| R3-T1- | VKPSQTLSLTCT | LEWIGY (SEQ ID | VDTSKNQFSLKLS | VTVSS |
| P4- | VS (SEQ ID NO: | NO: 1382) | SVTAADTAVYYC | (SEQ ID |
| H4_PelB- | 1359) | | (SEQ ID NO: 1414) | NO: 405) |
| F_2020 | | | | |
| Jun. | | | | |
| 20_H04 | | | | |
| SARS2- | QVQLVQSGGGV | MHWVRQAPGK | YYADSVKGRFTIS | WGQGTL |
| R3-G2- | VRPGRSLRLSCA | GLEWVAV (SEQ | RDNAKNSLYLQM | VTVSS |
| P1- | AS (SEQ ID NO: | ID NO: 391) | NSLRAEDTAVYY | (SEQ ID |
| E8_PelB- | 1350) | | C (SEQ ID NO: | NO: 369) |
| F_2020 | | | 1397) | |
| Jun. | | | | |
| 25_A02 | | | | |
| SARS2- | QVQLVQSGGGL | MHWVRQAPGK | YYADSVKGRFTIS | WGQGTL |
| R3-G1- | VQPGGSLRLSC | GLEWVAV (SEQ | RDNSKNTLYLQM | VTVSS |
| P1- | AAS (SEQ ID | ID NO: 391) | NSLRAEDTAVYY | (SEQ ID |
| C3_PelB- | NO: 438) | | C (SEQ ID NO: | NO: 369) |
| F_2020 | | | 1385) | |
| Jun. | | | | |
| 25_A07 | | | | |
| SARS2- | EVQLVQSGGGL | MHWVRQAPGK | DYAESVKGRFTIS | WGQGTL |
| R3-G3- | VQPGGSLRLPCS | GLEHISI (SEQ ID | RDNSKNTLYLQM | VTVSS |
| P1- | AS (SEQ ID NO: | NO: 1383) | TSLREEDTAVYY | (SEQ ID |
| G2_PelB- | 1360) | | C (SEQ ID NO: | NO: 369) |
| F_2020 | | | 1415) | |
| Jun. | | | | |
| 25_G04 | | | | |
| SARS2- | QVQLVQSGAEV | ISWVRQAPGQGP | NYAQRFQGRVTI | WGKGTL |
| R3-G1- | KKPGSSAKVSC | EWMGR (SEQ ID | TADESTNTAYME | VTVSS |
| P4- | KAS (SEQ ID | NO: 1384) | LSSLRSEDTAVYY | (SEQ ID |
| D1_PelB- | NO: 1361) | | C (SEQ ID NO: | NO: 429) |
| F_2020 | | | 1405) | |
| Jun. | | | | |
| 25_A08 | | | | |

TABLE 64B
Light chain (V_{L}) framework regions (FRs) of the COVID-19_antibodies.

| Seq ID | FR1-IMGT | FR2-IMGT | FR3-IMGT | FR4-IMGT |
|---|---|---|---|---|
| S1-R3- | LPVLTQPPS.AS | VNWYQQLPGTA | QRPSGVPDRFSG | FGSGTKVT |
| T1-H7 | GTPGQRVTISCS | PKLLIY | SKSGTSASLAISG | VL |
| (Ab12) | GS | (SEQ ID NO: 543) | LQSEDEADYYC | (SEQ ID |
| | (SEQ ID NO: 542) | | (SEQ ID NO: 544) | NO: 545) |
| RBD-R3- | NFMLTQPHS.VS | VQWYQQRPGSS | QRPSGVPDRFSG | FGGGTKLT |
| E1-G7 | ESPGKTVTISCT | PTTVIY | SIDSSSNSASLTIS | VL |
| (AB2-10) | RS | (SEQ ID NO: 547) | GLTTEDEADYYC | (SEQ ID |
| | (SEQ ID NO: 546) | | (SEQ ID NO: 548) | NO: 549) |
| S1-RBD- | QPGLTQPPS.AS | VTWYQQLPGTA | QRPSGVPDRFSA | FGGGTKLT |
| R3-E1- | GTPGQRVTISCS | PKLLIY | SRSGTSASLAITG | VL |
| D8 | GS | (SEQ ID NO: 551) | LQAEDEADYYC | SEQ ID |
| (Ab_3) | (SEQ ID NO: 550) | | (SEQ ID NO: 552) | NO: 553) |
| S1-RBD- | NFMLTQPHS.VS | VQWYQQRPGSS | LRPSGVPDRFSG | FGGGTKLT |
| R3-T1- | ESPGNTVTISCT | PTTVIF | SIDSSSNSASLTIS | VL |
| C7 | RT | (SEQ ID NO: 555) | GLKTEDEADYY | (SEQ ID |
| | (SEQ ID NO: 554) | | C | NO: 557) |
| | | | (SEQ ID NO: 556) | |
| RBD-R3- | NFMLTQPHS.VS | VQWYRQRPGSA | QRPAGVPDRFSG | FGTGTKLT |
| T1-F4 | ESPGKTVIISCTR | PTTVIY | SVDSSSNSASLTI | VL |
| (Ab2-2) | T | (SEQ ID NO: 559) | TGLKTEDEADY | (SEQ ID |
| | (SEQ ID NO: 558) | | YC | NO: 561) |
| | | | (SEQ ID NO: 560) | |
| RBD-R3- | SYELTQPPS.VSE | VSWYQHLPGKA | RLPSGVSDRFSG | FGGGTKLT |
| E1-A5 | APRQRVTISCSG | PKLLIY | SKSGTSASLAISG | VL |
| | S | (SEQ ID NO: 563) | LRSEDEADYYC | (SEQ ID |
| | (SEQ ID NO: 562) | | (SEQ ID NO: 564) | NO: 565) |
| S1-RBD- | NFMLTQPHS.VS | VQWYQQRPGSS | QRPSGVPDRFSG | FGGGTKLT |
| R3-T1- | ESPGKTVTISCT | PTTVIY | SIDSSSNSASLTIS | VL |
| F5 | RS | (SEQ ID NO: 567) | GLKAEDEADYY | (SEQ ID |
| (Ab2-7) | (SEQ ID NO: 566) | | C | NO: 569) |
| | | | (SEQ ID NO: 568) | |
| S1-R3- | QPVLTQPPSASG | VNWYQQLPGTA | QRPSGVPDRFSD | FGTGTKVT |
| T1-A12 | TPGQRVTISCSG | PKLLIY | SKSGTSASLAISG | VL |
| (Ab_5) | S | (SEQ ID NO: 571) | LQSEDEADYFC | (SEQ ID |
| | (SEQ ID NO: 570) | | (SEQ ID NO: 572) | NO: 573) |
| S1-R3- | QSVLTQPPSASG | VSWYQQYPGKA | KRPSGVPDRFSG | FGGGTKLT |
| T1-A6 | SPGQSVTISCTG | PKLMIY | SKSGNTASLTVS | VL |
| (Ab_4) | T | (SEQ ID NO: 575) | GLRAEDEADYY | (SEQ ID |
| | (SEQ ID NO: 574) | | C | NO: 577) |
| | | | (SEQ ID NO: 576) | |
| S1-RBD- | QPGLTQPPSVSV | VHWYQQKAGQ | DRPSEIPERFSGS | FGTGTKVT |
| R3-T1- | APGKTARITCG | APVLVVY | NSGNTATLTISR | VL |
| A5 | GN | (SEQ ID NO: 579) | AEVGDEADYYC | (SEQ ID |
| | (SEQ ID NO: 578) | | (SEQ ID NO: 580) | NO: 581) |
| S1-RBD- | SSELTQDPAVSV | AGWYQQKPGQA | KRPSGIPDRFSAS | FGGGTKLT |
| R3-T1- | VLGQAVRITCQ | PVLVTY | TSGNTASLTITG | VL |
| B3 | GD | (SEQ ID NO: 583) | AQADDEADYYC | (SEQ ID |
| (Ab_1) | (SEQ ID NO: 582) | | (SEQ ID NO: 584) | NO: 585) |
| S1-RBD- | QSALTQPPSVSG | VSWYQQPPGKA | NRPSGVSNRFSG | FGTGTKVT |
| R3-T1- | SPGQSVTISCTG | PKLMIY | SKSGNTASLTISG | VL |
| E7 | T | (SEQ ID NO: 587) | LQAEDEADYYC | (SEQ ID |
| | (SEQ ID NO: 586) | | (SEQ ID NO: 588) | NO: 589) |
| S1-RBD- | QSVVTQPPSVSG | VQWYQQLPGTA | NRPSGVPDRFSA | FGGGTKVT |
| R3-T1- | APGQRVTISCTG | PKLLIW | SKSGTSASLAITG | VL |
| F9 | S | (SEQ ID NO: 591) | LQAEDEADYFC | (SEQ ID |
| | (SEQ ID NO: 590) | | (SEQ ID NO: 592) | NO: 593) |
| S1-R3- | NFMLTQPHSVS | VQWYQQRPGSS | DRPSGVPDRFSG | FGGGTQLT |
| T1-C2 | ESPGKTVTISCT | PTTVIY | SIDSSSNSASLTIS | VL |
| (Ab_6) | RS | (SEQ ID NO: 595) | GLKPEDEADYY | (SEQ ID |
| | (SEQ ID NO: 594) | | C | NO: 597) |
| | | | (SEQ ID NO: 596) | |
| RBD-R3- | QTVVTQEPAVS | ASWYQQKPGQA | KRPSGIPDRFSGS | FGGGTKLT |
| E1-B3 | VALGQTVRITC | PVLVVY | TSGNTASLTITG | VL |
| | QGD | (SEQ ID NO: 599) | AQAEDEADYYC | (SEQ ID |
| | (SEQ ID NO: 598) | | (SEQ ID NO: 600) | NO: 601) |
| RBD-R3- | EIVLTQSPATLS | LAWYQQRPGQA | TRATAIPARFSGS | FGGGTKVE |
| T1-B5 | LSPGERATLSCR | PRLLIY | GSGTEFTLTISRL | IN |
| | AS | (SEQ ID NO: 603) | EPEDFATYYC | (SEQ ID |
| | (SEQ ID NO: 602) | | (SEQ ID NO: 604) | NO: 605) |
| RBD-R3- | QSALTQPPSASG | VSWYQQHPGKA | KRPPGVPDRFSG | FGGGTKLT |
| T1-H3 | SPGQSVTISCTG | PKLLIY | SKSGNTASLTVS | VL |
| (Ab_2) | T | (SEQ ID NO: 607) | GLQAEDEADYY | (SEQ ID |
| | (SEQ ID NO: 606) | | C | NO: 609) |
| | | | (SEQ ID NO: 608) | |
| S1-R3- | QPGLTQPPSVSK | AAWLQQHQGHP | NRPPGISERFSAS | FGGGTKLS |
| T1-C4 | GLRQTATLTCT | PKLLSY | RSGNTASLTITGL | VL |
| (Ab_8) | GN | (SEQ ID NO: 611) | QPEDEADYYC | (SEQ ID |
| | (SEQ ID NO: 610) | | (SEQ ID NO: 612) | NO: 613) |
| S1-RBD- | NFMLTQPHSVS | VQWYQQRPGSA | QRPSGVPDRFSG | FGGGTKLT |
| R3-T1- | ESPGKTVTISCT | PTTVIY | SIDSSSNSASLTIS | VL |
| B12 | GS | (SEQ ID NO: 615) | GLKTEDEADYY | (SEQ ID |
| | (SEQ ID NO: 614) | | C | NO: 617) |
| | | | (SEQ ID NO: 616) | |
| S1-RBD- | NFMLTQPHSVS | VQWYQQRPGSA | QRPSGVPDRFSG | FGGGTKLT |
| R3-T1- | ESPGKTVTISCT | PTTVIY | SIGSSSNSASLTIS | VL |
| G5 | GS | (SEQ ID NO: 619) | GLKTEDEADYY | (SEQ ID |
| | (SEQ ID NO: 618) | | C | NO: 621) |
| | | | (SEQ ID NO: 620) | |
| S1-RBD- | QPGLTQPPSVSV | VHWYQQKPGRA | GRPSGIPERFSGS | FATGTKVS |
| R3-T1- | APGQTARISCGG | PVLVVY | NSGNTATLTVSR | IL |
| E2 (Ab7) | N | (SEQ ID NO: 623) | VEAGDEADYYC | (SEQ ID |
| | (SEQ ID NO: 622) | | (SEQ ID NO: 624) | NO: 625) |
| RBD-R3- | QPGLTQPASVS | VSWYQQHPGKA | KRPSGISNRFSGS | FGGGTKLT |
| T1-F7 | GSPGQSVTISCT | PKLMIY | KSGNTASLTISGL | VL |
| | GT | (SEQ ID NO: 627) | QAEDEADYFC | (SEQ ID |
| | (SEQ ID NO: 626) | | (SEQ ID NO: 628) | NO: 629) |
| S1-RBD- | QPGLTQPPSASG | VNWYQQLPGTA | QRPSGVPDRFSG | FGGGTKLT |
| R3-T1- | TPGQRVTISCSG | PKLLIY | SKSGTSASLAISG | VL |
| G1 | S | (SEQ ID NO: 631) | LRSEDEADYYC | (SEQ ID |
| | (SEQ ID NO: 630) | | (SEQ ID NO: 632) | NO: 633) |
| S1-RBD- | QPVLTQPHSVSE | VQWYQQRPGSA | QRPSGVPDRFSG | FGGGTKLT |
| R3-T1- | SPGKTVTISCTR | PTTVIY | SIDSSSNSASLIIS | VL |
| C2 | S | (SEQ ID NO: 635) | GLMTEDEADYY | (SEQ ID |
| | (SEQ ID NO: 634) | | C | NO: 637) |
| | | | (SEQ ID NO: 636) | |
| S1-RBD- | QPGLTQPPSVSV | VHWYQQKAGQ | GRPSGIPERFSGS | FGPGTRLS |
| R3-T1- | APGQTATITCGG | APVLVVY | NSGNTATLTISR | VL |
| H8 | D | (SEQ ID NO: 639) | VEAGDEADYYC | (SEQ ID |
| | (SEQ ID NO: 638) | | (SEQ ID NO: 640) | NO: 641) |
| S1-RBD- | NFMLTQPHSVS | VQWYQQRPGSA | QRPSGVPDRFSG | FGGGTKLT |
| R3-E1- | ESPGKTVLISCT | PTTVIY | SIDSSSNSASLTIS | VL |
| E8 | RS | (SEQ ID NO: 643) | GLKTEDEADYY | (SEQ ID |
| | (SEQ ID NO: 642) | | C | NO: 645) |
| | | | (SEQ ID NO: 644) | |
| RBD-R3- | EIVLTQSPATLS | LPWYQQKPGQA | TRATGIPPRFSGS | FDGGTNVE |
| T1-H2 | VSPGERATLSCR | PRLLMY | GSGTEFSLTISSL | IK |
| | AS | (SEQ ID NO: 647) | QSEDFAVYYC | (SEQ ID |
| | (SEQ ID NO: 646) | | (SEQ ID NO: 648) | NO: 649) |
| S1-RBD- | NFMLTQPHSVS | VQWYQQRPGSF | QRPSGVPYRFSG | FGGGTKLT |
| R3-T1- | ESPGKTITISCTR | PITVIY | SIDRSSNSAALTI | VL |
| B7 | T | (SEQ ID NO: 651) | SDLKTEDEADYY | (SEQ ID |
| | (SEQ ID NO: 650) | | C | NO: 653) |
| | | | (SEQ ID NO: 652) | |
| S1-RBD- | QSALTQPASVS | VSWYQQHPGKA | KRPSGVPDRFSG | FGTGTKVT |
| R3-E1- | GSPGQSITISCTG | PKLMIY | SKSGNTASLTISG | VL |
| E5 | T | (SEQ ID NO: 655) | LQAEDEADYYC | (SEQ ID |
| | (SEQ ID NO: 654) | | (SEQ ID NO: 656) | NO: 657) |
| S1-R3- | SYELTQPPSVSV | VHWYQQKSGQA | DRPSGIPERFSGS | FGGGTKLT |
| T1-H6 | APGQTARITCG | PVLVVY | NSGNTATLTISR | VL |
| | GD | (SEQ ID NO: 659) | VEAGDEADYYC | (SEQ ID |
| | (SEQ ID NO: 658) | | (SEQ ID NO: 660) | NO: 661) |
| S1-RBD- | SSELTQDPAVSV | ASWYQQKPGQA | NRPSGIPDRFSGS | FGGGTKLA |
| R3-E1- | ALGQTVKITCQ | PVRVIY | SSGNTASLTITGA | VL |
| C6 | GD | (SEQ ID NO: 663) | QAEDEADYYC | (SEQ ID |
| | (SEQ ID NO: 662) | | (SEQ ID NO: 664) | NO: 665) |
| S1-RBD- | QSALTQPPSASG | VSWYQHHPDKA | NRPSGVSSRFSG | FGTGTEVT |
| R3-E1- | SPGQSLTISCTG | PKLLIY | SKSGNTASLTISG | PR |
| F2 | T | (SEQ ID NO: 667) | LQAEDEADYYC | (SEQ ID |
| | (SEQ ID NO: 666) | | (SEQ ID NO: 668) | NO: 669) |
| S1-RBD- | LPVLTQPPSVSV | VHWYQQKPGQA | DRPSGIPERFSGS | FGGGTTLT |
| R3-T1- | APGQTASITCGG | PLLVIY | SSGNTATLTISRV | VL |
| C3 | D | (SEQ ID NO: 671) | EAGDEADYYC | (SEQ ID |
| | (SEQ ID NO: 670) | | (SEQ ID NO: 672) | NO: 673) |
| S1-RBD- | QSALTQPRSVSG | VSWYQQHPGKA | KRPSGVPDRFSG | FGGGTKLT |
| R3-T1- | SPGQSVTISCTG | PKLIIY | SKSGNTASLTVS | VL |
| G12 | T | (SEQ ID NO: 675) | GLQAEDEADYY | (SEQ ID |
| | (SEQ ID NO: 674) | | C | NO: 677) |
| | | | (SEQ ID NO: 676) | |
| S1-RBD- | QSVLTQPPSASG | VSWYQQHPGKA | RRPSGVSSRFSGS | FGTGTKVT |
| R3-E1- | SPGQSVTISCTG | PKLMIY | KSGNTASLTISGL | VL |
| F1 | T | (SEQ ID NO: 679) | QAEDEADYYC | (SEQ ID |
| | (SEQ ID NO: 678) | | (SEQ ID NO: 680) | NO: 681) |
| S1-RBD- | NFMLTQPHSVS | VQWYQQRPGSA | QRPSGVPDRFSG | FGGGTKLT |
| R3-E1- | ESPGKTVTISCT | PTTVIY | SIDSSSNSASLTIS | VL |
| H8 | GS | (SEQ ID NO: 683) | GLKTEDEADYY | (SEQ ID |
| | (SEQ ID NO: 682) | | C | NO: 685) |
| | | | (SEQ ID NO: 684) | |
| S1-RBD- | QPGLTQTPSPSG | VTWYQQLPGTA | QRPSGVPDRFSA | FGGGTKM |
| R3-T1- | TPGQRVTISCSG | PKLLIY | SRSGTSPSLAITG | TVL |
| F1 | S | (SEQ ID NO: 687) | LQAEDEADYYC | (SEQ ID |
| | (SEQ ID NO: 686) | | (SEQ ID NO: 688) | NO: 689) |
| S1-R3- | LPVLTQPPSASG | VNWYHQLPRTA | HRPSGVPDRFSG | FGSGTKVT |
| T1-B10 | TPGQRVTISCSG | PKLLIY | S*SGTSASLAITV | VL |
| | S | (SEQ ID NO: 691) | IQSEDEADYYC | (SEQ ID |
| | (SEQ ID NO: 690) | | (SEQ ID NO: 692) | NO: 693) |
| RBD-R3- | LPVLTQPPSASG | VNWYHYLPRTA | HRASRVPDRFSG | FGSGTKVT |
| E1-D12 | TPGQRVTISCSG | PKLLIY | S*SGTSASLAITV | VL |
| | S | (SEQ ID NO: 695) | IQSEDEADYYC | (SEQ ID |
| | (SEQ ID NO: 694) | | (SEQ ID NO: 696) | NO: 697) |
| RBD-R3- | LPVLTQPPSASG | VNWYQQLPGTA | QRPSRVPDRFSG | FGSGTKSP |
| T1-C5 | TPGQRVTISCSG | PKLLIY | SKTGTSPSLAISV | SY |
| | S | (SEQ ID NO: 699) | LOSEDEADYYC | (SEQ ID |
| | (SEQ ID NO: 698) | | (SEQ ID NO: 700) | NO: 701) |
| S1-RBD- | QPVLTQPPSASG | VNWYQQLPGTA | QRPSGVPDRFSG | FGGGTKLT |
| R3-T1- | TPGQRVTISCSG | PKLLIY | SKSGTSASLAISG | VL |
| B4 | S | (SEQ ID NO: 703) | LQSEDEADYYC | (SEQ ID |
| | (SEQ ID NO: 702) | | (SEQ ID NO: 704) | NO: 705) |
| S1-RBD- | SSELTQDPAVSV | ASWYQQKPGQA | NRPSGIPDRFSGS | FGGGTKLT |
| R3-E1- | ALGQTVRITCQ | PVLVIY | SSGNTASLTITGA | VL |
| E7 | GD | (SEQ ID NO: 707) | QAEDEADYYC | (SEQ ID |
| | (SEQ ID NO: 706) | | (SEQ ID NO: 708) | NO: 709) |
| S1-RBD- | QPVLTQPPSASG | VNWYQQLPGTA | QRYPGVPDRFSG | FGGGTKLT |
| R3-T1- | TPGQRVTISCSG | PKLLIY | SKSGTSASLAISG | VL |
| C8 | S | (SEQ ID NO: 711) | LRSEDEADYYC | (SEQ ID |
| | (SEQ ID NO: 710) | | (SEQ ID NO: 712) | NO: 713) |
| S1-RBD- | QPGLTQPPSASG | VHWYQQLPGTA | QRPSGVPDRFSG | FGGGTKLT |
| R3-T1- | TPGQGVTISCSG | PKLLIY | SKSGTSASLAISG | VL |
| D7 | S | (SEQ ID NO: 715) | LRSEDEADYYC | (SEQ ID |
| | (SEQ ID NO: 714) | | (SEQ ID NO: 716) | NO: 717) |
| RBD-R3- | NFMLTQPHSVS | VQWLQQRLGSA | QRPSGVPDRFSG | FGGGTKLT |
| E1-F5 | ESPGKTVTISCT | PTTVIY | SIDSSSNSASLTIS | VL |
| | GS | (SEQ ID NO: 719) | GLKTEDEADYY | (SEQ ID |
| | (SEQ ID NO: 718) | | C | NO: 721) |
| | | | (SEQ ID NO: 720) | |
| Ab_13 | NFMLTQPHSVS | VQWYQQRPGSA | QRPSGVPDRFSG | FGGGTKLT |
| | ESPGKTVTISCT | PTTVIY | SIDSSSNSASLTIS | VL |
| | RS | (SEQ ID NO: 915) | GLKTEDEADYY | (SEQ ID |
| | (SEQ ID NO: | | C | NO: 917) |
| | 914) | | (SEQ ID NO: 916) | |
| Ab_14 | QSVLTQPPSASG | VSWYQHHPGKA | KRPSGVPDRFSG | FGGGTKLT |
| | SPGQSVTISCTG | PKLIIY | SKSGNTASLTVS | VL |
| | T | (SEQ ID NO: 919) | GLQADDEADYY | (SEQ ID |
| | (SEQ ID NO: | | C | NO: 921) |
| | 918) | | (SEQ ID NO: 920) | |
| Ab_15 | NFMLTQPHSVS | VQWYQQRPGSA | QRPSGVPDRFSG | FGTGTKVT |
| | ESPGKTVTISCT | PTTVIY | SIDRSSNSASLTIS | VL |
| | RS | (SEQ ID NO: 923) | GLTPDDEADYY | (SEQ ID |
| | (SEQ ID NO: 922) | | C | NO: 925) |
| | | | (SEQ ID NO: 924) | |
| Ab_16 | QSVLTQPPSVSG | VHWYQQVPGAA | NRPSGVPDRFSG | FGTGTKVT |
| | SPGQRVTMSCT | PRLLIY | SKSGTSASLTITG | VL |
| | GS | (SEQ ID NO: 927) | LQAEDEADYYC | (SEQ ID |
| | (SEQ ID NO: 926) | | (SEQ ID NO: 928) | NO: 929) |
| Ab_17 | QSALTQPASVS | VSWYQQHPGKA | KRPSGVPDRFSG | FGGGTKLT |
| | GSPGQSITISCTG | PKVMIY | SKSGNTASLTISG | VL |
| | T | (SEQ ID NO: 931) | LQAEDEADYYC | (SEQ ID |
| | (SEQ ID NO: 930) | | (SEQ ID NO: 932) | NO: 933) |
| Ab_18 | NFMLTQPHSMS | VQWYQQRPGSA | QRPSGVPDRFSG | FGGGTRLT |
| | GSAGKTVTVSCI | PTTVIY | SIDSSSNSASLTIS | VL |
| | RS | (SEQ ID NO: 935) | GLKTEDEADYY | (SEQ ID |
| | (SEQ ID NO: 934) | | C | NO: 937) |
| | | | (SEQ ID NO: 936) | |
| Ab_19 | QPGLTQPPAAS | VSWFKQFPETAP | HRPSGVPDRVSG | FGSGTKVT |
| | GTPGQRVTVSC | RLLIS | SKSGTSASLTISG | VL |
| | SGA | (SEQ ID NO: 939) | LQSDDEADYYC | (SEQ ID |
| | (SEQ ID NO: 938) | | (SEQ ID NO: 940) | NO: 941) |
| Ab_20 | NFMLTQPHSVS | VQWYQQRPGSA | QRPSGVP.DRFSG | FGGGTKLT |
| | ESPGKTVTISCT | PTTVIY | SIDSSSNSASLLIS | VL |
| | GS | (SEQ ID NO: 943) | GLKTEDEADYY | (SEQ ID |
| | (SEQ ID NO: 942) | | C | NO: 945) |
| | | | (SEQ ID NO: 944) | |
| Ab_21 | QSALTQPRSVSG | VSWYQQHPGKA | KRPSGVPDRFSG | FGGGTKLT |
| | SPGQSVTISCTG | PKLIIY | SKSGNTASLTVS | VL |
| | T | (SEQ ID NO: 947) | GLQAEDEADYY | (SEQ ID |
| | (SEQ ID NO: 946) | | C | NO: 949) |
| | | | (SEQ ID NO: 948) | |
| Ab_22 | NFMLTQPHSVS | VQWYRQRPGSA | QRPAGVPDRFSG | FGTGTKLT |
| | ESPGKTVIISCTR | PTTVIY | SVDSSSNSASLTI | VL |
| | T | (SEQ ID NO: 951) | TGLKTEDEADY | (SEQ ID |
| | (SEQ ID NO: 950) | | YC | NO: 953) |
| | | | (SEQ ID NO: 952) | |
| Ab_23 | QSALTQPPSASG | VSWYQQVPGKA | NRPSGVSSRFSG | FGGGTKLT |
| | SPGQSVTISCTG | PKLIIY | SKSGNTASLTISG | VL |
| | T | (SEQ ID NO: 955) | LQAEDEADYYC | (SEQ ID |
| | (SEQ ID NO: 954) | | (SEQ ID NO: 956) | NO: 957) |
| Ab_24 | QPVLTQPPSASG | VDWYHQVPGTA | ERSSGVPDRFSA | FGGGTKLT |
| | TPGQRVSISCSG | PQLLIY | SRSGNTASLTIIG | VL |
| | S | (SEQ ID NO: 959) | LQPEDEADYYC | (SEQ ID |
| | (SEQ ID NO: 958) | | (SEQ ID NO: 960) | NO: 961) |
| Ab_25 | NFMLTQPHSVS | VQWYQQRPGSA | QRPSGVPDRFSG | FGGGTKLT |
| | ESPGKTVTISCT | PTTVIY | SIGSSSNSASLTIS | VL |
| | GS | (SEQ ID NO: 963) | GLKTEDEADYY | (SEQ ID |
| | (SEQ ID NO: 962) | | C | NO: 965) |
| | | | (SEQ ID NO: 964) | |
| Ab_26 | LPVLTQPPSVSV | VHWYQQKPGQA | DRPSGIPERFSGS | FGGGTTLT |
| | APGQTASITCGG | PLLVIY | SSGNTATLTISRV | VL |
| | D | (SEQ ID NO: 967) | EAGDEADYYC | (SEQ ID |
| | (SEQ ID NO: 966) | | (SEQ ID NO: 968) | NO: 969) |
| Ab_27 | QSALTQPPSVSG | VSWYQQPPGKA | NRPSGVSNRFSG | FGTGTKVT |
| | SPGQSVTISCTG | PKLMIY | SKSGNTASLTISG | VL |
| | T | (SEQ ID NO: 971) | LQAEDEADYYC | (SEQ ID |
| | (SEQ ID NO: 970) | | (SEQ ID NO: 972) | NO: 973) |
| Ab_28 | NFMLTQPHSVS | VQWYQQRPGSA | QRPSGVPDRFSG | FGGGTKLT |
| | ESPGKTVTISCT | PTTVIY | SIDSSSNSASLTIS | VL |
| | GS | (SEQ ID NO: 975) | GLKTEDEADYY | (SEQ ID |
| | (SEQ ID NO: 974) | | C | NO: 977) |
| | | | (SEQ ID NO: 976) | |
| Ab_38 | EIVLTQSPATLS | LAWYQQKPGQA | TRATGIPARFSGS | FGGGTKVE |
| | VSPGERATLSCR | PRLLMY | GSGTEFSLTISSL | IK |
| | AS | (SEQ ID NO: 994) | QSEDFAVYYC | (SEQ ID |
| | (SEQ ID NO: 993) | | (SEQ ID NO: 995) | NO: 996) |
| wcS2- | NFMLTQPHSVS | VQWYQQRPGSA | QRPSGVSGRFSG | FGGGTKLT |
| T4-E7 | ESPGKTVTMSC | PTTVIY | SIDSSSNSASLTIS | VL |
| | TRS | (SEQ ID NO: 615) | GLQPEDEADYY | (SEQ ID NO: |
| | (SEQ ID NO: | | C | 549) |
| | 1419) | | (SEQ ID NO: 1495) | |
| wcS2- | QPVLTQPPSASG | VSWYQQHPDKA | KRPSGVPDRFSG | FGGGTKVT |
| E1-A9 | SPGQSVTISCTG | PKLLIY | SKSGNTASLTVS | VL |
| | T | (SEQ ID NO: 1458) | GLQADDEADYY | (SEQ ID NO: |
| | (SEQ ID NO: | | C | 593) |
| | 1420) | | (SEQ ID NO: 920) | |
| wcS2- | ETTLTQSPATLS | LAWYQQKPGQA | SRATGIPDRFSGS | FGGGTKVE |
| T4-H8 | LSPGERATLSCR | PRLLIY | GSGTDFTLTISRL | IK |
| | AS | (SEQ ID NO: 1459) | EPEDFAVYYC | (SEQ ID NO: |
| | (SEQ ID NO: | | (SEQ ID NO: 1496) | 996) |
| | 1421) | | | |
| wcS2- | QPVLTQPRSVSG | VSWYQHHPGKA | ERPSGVSSRFSGS | FGTGTRVA |
| T3-F5 | SPGQSVTISCTG | PKLMIY | KSGNTASLTISGL | VL |
| | T | (SEQ ID NO: 1460) | QGEDEADYFC | (SEQ ID NO: |
| | (SEQ ID NO: | | (SEQ ID NO: 1497) | 1542) |
| | 1422) | | | |
| wcS2- | QSVLTQPPSASG | VSWYQQHPGKA | KRPSGVPDRFSG | FGTGTKVT |
| E2-C1 | SPGQSVTISCTG | PKPMIY | SKSGNTASLTVS | VL |
| | T | (SEQ ID NO: 1461) | GLQAEDEADYY | (SEQ ID NO: |
| | (SEQ ID NO: 574) | | C | 573) |
| | | | (SEQ ID NO: 676) | |
| wcS2- | EIVLTQSPATLS | LAWYQQKPGQA | SRANGIPDRFSGS | FGGGTKLE |
| T4-C9 | LSPGERATLSCR | PRLLIN | GSGTDFTLTITRL | IK |
| | AS | (SEQ ID NO: 1462) | EPEDFAVYFC | (SEQ ID NO: |
| | (SEQ ID NO: 602) | | (SEQ ID NO: 1498) | 1543) |
| wcS2- | SSELTQDPAVSV | ASWYQQKPGQA | NRPSGIPDRFSGS | FGGGTKLT |
| T3-B9 | ALGQTVRITCQ | PLLVIY | SSGNTASLTITGA | VL |
| | GD | (SEQ ID NO: 1463) | QAEDEADYYC | (SEQ ID NO: |
| | (SEQ ID NO: 706) | | (SEQ ID NO: 664) | 549) |
| wcS2- | QSVLTQPLSASG | VNWYQQVPGTA | RRPSGVPDRFSG | FGTGTKVT |
| E3-C8 | TPGHRVTISCSG | PKLLIY | SKSGTSAALAIS | VL |
| | S | (SEQ ID NO: 1464) | GLQSEDEADYY | (SEQ ID NO: |
| | (SEQ ID NO: | | C | 573) |
| | 1423) | | (SEQ ID NO: 1499) | |
| wcS2- | NFMLTQPHSVS | VQWYQQRPGSA | QRPSGVPDRFSG | FGGGTKLT |
| T4-F8 | ESPGKTVTISCT | PTAVIF | SIDSSSNSASLTIS | VL |
| | RS | (SEQ ID NO: 1465) | GLRTEDEADYY | (SEQ ID NO: |
| | (SEQ ID NO: 594) | | C | 549) |
| | | | (SEQ ID NO: 1500) | |
| wcS2- | LPVLTQPPSASG | VNWYQQLPGTA | QRPSGVPDRFSG | FGGGTNLA |
| T3-F1 | TPGQRVTISCSG | PKLLIY | SKSGTSASLAISG | VL |
| | S | (SEQ ID NO: 543) | LRSEDEADYYC | (SEQ ID NO: |
| | (SEQ ID NO: 690) | | (SEQ ID NO: 632) | 1544) |
| wcS2- | SSELTQDPAVSV | ASWYQQKPGQA | NRPSGIPDRFSGS | FGTGTKVT |
| E2-B1 | ALGQTVRITCQ | PVLVIY | SSGNTASLTITGA | VL |
| | GD | (SEQ ID NO: 707) | QAEDEADYYC | (SEQ ID NO: |
| | (SEQ ID NO: 706) | | (SEQ ID NO: 664) | 573) |
| wcS2- | SYELTQPPSVSQ | AAWLQQHQGHP | IRPSGISERLSAST | FGEGTKLT |
| T2-G3 | GLRQTATLTCT | PKLLSY | SGNTASLTITGL | VL |
| | GN | (SEQ ID NO: 611) | QPEDEADYYC | (SEQ ID NO: |
| | (SEQ ID NO: | | (SEQ ID NO: 1501) | 1545) |
| | 1424) | | | |
| wcS2- | QSVLTQPLSASG | VNWYQQVPGTA | RRPSGVPDRFSG | FGTGTKVT |
| T1-A6 | TPGHRVTISCSG | PKLLIY | SKSGTSAALAIS | VL |
| | S | (SEQ ID NO: 1464) | GLQSEDEADYY | (SEQ ID NO: |
| | (SEQ ID NO: | | C | 573) |
| | 1423) | | (SEQ ID NO: 1499) | |
| wcS2- | NFMLTHPHSVS* | VQWYQKRPGSA | QRPAGVSGRFSG | FGGGTNLT |
| T4-D4 | SPGKTATMSCT | PTTVIY | SIDSSSNSASLTIS | VL |
| | RS | (SEQ ID NO: 1466) | AVHPEDEADYY | (SEQ ID NO: |
| | (SEQ ID NO: | | C | 1546) |
| | 1425) | | (SEQ ID NO: 1502) | |
| wcS2- | HFVLTQPPSASE | DDCCHQRPPGAP | HKPSAGSADLFA | FGAGTKVT |
| T2-D10 | SPGKTVTMSCT | PTAMN | AFDSASTSALIAF | VL |
| | GT | (SEQ ID NO: 1467) | SVLHADDDDDY | (SEQ ID NO: |
| | (SEQ ID NO: | | CC | 1547) |
| | 1426) | | (SEQ ID NO: 1503) | |
| wcS2- | ETTLTQSPGTLS | LAWYQQKPGQA | NRAPGIPARFSGS | FGPGTKVH |
| T1-G9 | LSPGERATLSCR | PRLLIY | GSGTDFTLTISSL | IK |
| | AS | (SEQ ID NO: 1459) | EPEDFAVYYC | (SEQ ID NO: |
| | (SEQ ID NO: | | (SEQ ID NO: 1504) | 1548) |
| | 1427) | | | |
| wcS2- | EIVLTQSPATLA | LAWYQQRPGQA | SRANGIPYRFSGS | SAERTKME |
| E3-H7 | LSPGERATLSCR | PRLLIN | GSGTDFTLTITRL | IK |
| | DS | (SEQ ID NO: 1468) | EPEDFAVYFC | (SEQ ID NO: |
| | (SEQ ID NO: | | (SEQ ID NO: 1505) | 1549) |
| | 1428) | | | |
| wcS2- | SSELTQDPAVSV | ANWYQQKPGQA | ERPSGIPERFSGS | FGGGTKLT |
| T2-C11 | ALGQTVRITCQ | PILVMS | SSGTRVTLTISGV | VL |
| | GD | (SEQ ID NO: 1469) | QAEDEADYYC | (SEQ ID NO: |
| | (SEQ ID NO: 706) | | (SEQ ID NO: 1506) | 549) |
| SARS2- | QSALTQPASVS | VSWYQQHPGKA | KRPSGVPDRFSG | FGTGTKVA |
| R3-G2- | GSPGQSITISCTG | PKLMIY (SEQ ID | SKSGNTASLTVS | VL (SEQ ID |
| P1- | T (SEQ ID NO: | NO: 627) | GLQAEDEADYY | NO: 1550) |
| H9_PelB- | 654) | | C (SEQ ID NO: | |
| F_2020- | | | 676) | |
| 06- | | | | |
| 19_D08 | | | | |
| SARS2- | QSALTQPASVS | VSWYQQHPGKA | NRPSGVSNRFSG | FGAGTKVT |
| R3-G3- | GSPGQSITISCTG | PKLMIS (SEQ ID | SKSGNTASLTISG | VL (SEQ ID |
| P1- | T (SEQ ID NO: | NO: 1470) | LQAEDEADYYC | NO: 1547) |
| F8_PelB- | 654) | | (SEQ ID NO: 588) | |
| F_2020- | | | | |
| 06- | | | | |
| 19_F11 | | | | |
| SARS2- | EIVLTQSPATLS | LAWYQQKPGQA | TRATGIPARFSGS | FGQGTRVE |
| R3-G2- | VSPGERATLSCR | PRLLIY (SEQ ID | GSGTEFTLTVSR | IR (SEQ ID |
| P1- | AS (SEQ ID NO: | NO: 1459) | LEPEDFAVYYC | NO: 1551) |
| B4_PelB- | 646) | | (SEQ ID NO: | |
| F_2020- | | | 1507) | |
| 06- | | | | |
| 19_B02 | | | | |
| SARS2- | QSVLTQPPSASG | VNWYQQLPGTA | QRPSGVPDRFSG | FGGGTNLA |
| R3-G3- | TPGQRVTISCSG | PKLLIY (SEQ ID | SKSGTSVSLAISG | VL (SEQ ID |
| P1- | S (SEQ ID NO: | NO: 543) | LQSEDEADYYC | NO: 1544) |
| B2_PelB- | 1429) | | (SEQ ID NO: | |
| F_2020- | | | 1508) | |
| 06- | | | | |
| 19_A08 | | | | |
| SARS2- | SYELTQPPSVSV | VHWYQQKPGQA | DRPPGIPERFSGS | FGTGTKVT |
| R3-G3- | APGKTANMTCG | PVLVVY (SEQ ID | NSGNTATLTISR | VL (SEQ ID |
| P1- | GN (SEQ ID NO: | NO: 1471) | VEVGDEADYYC | NO: 573) |
| B3_PelB- | 1430) | | (SEQ ID NO: | |
| F_2020- | | | 1509) | |
| 06- | | | | |
| 19_B08 | | | | |
| SARS2- | SSELTQDPAVSV | ASWYQQKPGQA | NRPSGIPDRISGS | FGTGTKVT |
| R3-G1- | ALGQTVRITCQ | PVLVIY (SEQ ID | SSGNTASLTITGA | VL (SEQ ID |
| P3- | GD (SEQ ID NO: | NO: 707) | QAEDEADYYC | NO: 573) |
| E8_PelB- | 706) | | (SEQ ID NO: | |
| F_2020- | | | 1510) | |
| 06- | | | | |
| 19_H04 | | | | |
| SARS2- | QSGLTQPPSVSG | VHWYQQLPGTA | NRPSGVPDRFSG | FGGGTKLT |
| R3-G1- | APGQRVTISCTG | PKLIIY (SEQ ID | SKSGTSASLAITG | VL (SEQ ID |
| P2- | S (SEQ ID NO: | NO: 1472) | LQAEDEADYYC | NO: 549) |
| D7_PelB- | 1431) | | (SEQ ID NO: | |
| F_2020- | | | 1511) | |
| 06- | | | | |
| 19_H09 | | | | |
| SARS2- | SYELTQPPSVSV | AYWYQQRPGQA | ERPSGIPERFSGS | FGGGTKVT |
| R3-G1- | SPGQTARITCSG | PVLVIY (SEQ ID | SSGTTVTLTISGV | VL (SEQ ID |
| P1- | D (SEQ ID NO: | NO: 1473) | QAEDEADYYC | NO: 593) |
| C6_PelB- | 1432) | | (SEQ ID NO: | |
| F_2020- | | | 1512) | |
| 06- | | | | |
| 19_H02 | | | | |
| SARS2- | HTVLTHPAPAA | VSWYQQHPGKA | NRPSGVPDRFSG | S*TGTEVA |
| R3-T-P2- | AYPGQTITISCS | PTLVIY (SEQ ID | SIYGNTDSLTVS | FI (SEQ ID |
| E12_PelB- | AT (SEQ ID NO: | NO: 1474) | AGVEDEDDYYC | NO: 1552) |
| F_2020- | 1433) | | (SEQ ID NO: | |
| 06- | | | 1513) | |
| 19_D07 | | | | |
| SARS2- | DIVMTQTPSTLS | VAWYQQKPGKV | RLEPGVPSRFSGS | FGQGTKV |
| R3-G2- | ASVGDRVTISCR | PELLMY (SEQ ID | GSGTEFTLTISNL | DIK (SEQ |
| P1- | AS (SEQ ID NO: | NO: 1475) | QPEDFATYYC | ID NO: |
| D12_PelB- | 1434) | | (SEQ ID NO: | 1553) |
| F_2020- | | | 1514) | |
| 06- | | | | |
| 19_H04 | | | | |
| SARS2- | NFMLTQPHSVS | VQWYQQRPGSS | QRPSEVPDRFSG | FGGGTKLT |
| R3-G1- | ESPGKTVTISCT | PTAVIY (SEQ ID | SIDISSNSASLTIS | VL (SEQ ID |
| P2- | RS (SEQ ID NO: | NO: 1476) | GLKTEDEADYY | NO: 549) |
| E8_PelB- | 594) | | C (SEQ ID NO: | |
| F_2020- | | | 1515) | |
| 06- | | | | |
| 19_E10 | | | | |
| SARS2- | ETTLTQSPGTLS | LAWYQQKPGQA | TRATGIPARFSGS | FGQGTKLE |
| R3-G1- | LSPGERATLSCR | PRLLIY (SEQ ID | GSGTDFTLTISRL | IK (SEQ ID |
| P1- | AS (SEQ ID NO: | NO: 1459) | EPEDFAVYFC | NO: 1554) |
| A10_PelB- | 1427) | | (SEQ ID NO: | |
| F_2020- | | | 1516) | |
| 06- | | | | |
| 19_H01 | | | | |
| SARS2- | QSALTQPPSASG | VSWYQQPPGTA | NRPSGVPDRFSG | FGTGTKVT |
| R3-G1- | SPGQSVTISCTG | PKLMIY (SEQ ID | SKSGNTASLTISG | VL (SEQ ID |
| P3- | T (SEQ ID NO: | NO: 1477) | LQAEDEADYYC | NO: 573) |
| B5_PelB- | 606) | | (SEQ ID NO: | |
| F_2020- | | | 1517) | |
| 06- | | | | |
| 19_D02 | | | | |
| SARS2- | NFMLTQPHSVS | VQWYQQRPGSS | RRPSGVPDRFSG | FGGGTKLT |
| R3-G3- | GSPGKTVTISCT | PTTVIY (SEQ ID | SVDRSSNSASLTI | VL (SEQ ID |
| P1- | RD (SEQ ID NO: | NO: 547) | SGLDTEDEADYY | NO: 549) |
| A2_PelB- | 1435) | | C (SEQ ID NO: | |
| F_2020- | | | 1518) | |
| 06- | | | | |
| 19_B07 | | | | |
| SARS2- | QPVLTQPPSVSG | VQWYQQVPGTA | NRPSGVPDRFSG | FGTGTKVN |
| R3-G3- | APGQSVTISCIG | PKLLIY (SEQ ID | SKSGTSASLAISG | VL (SEQ ID |
| P1- | S (SEQ ID NO: | NO: 1478) | LRSEDEADYFC | NO: 1555) |
| D1_PelB- | 1436) | | (SEQ ID NO: | |
| F_2020- | | | 1519) | |
| 06- | | | | |
| 19_G09 | | | | |
| SARS2- | QPGLTQPPSVSK | AAWLQQHQGHP | NRPSGISERFSAS | FGGGSRLT |
| R3-G1- | DLRQTATLTCT | PKLLSY (SEQ ID | TSGNTASLTITGL | VL (SEQ ID |
| P2- | GN (SEQ ID NO: | NO: 611) | QPEDEADYYC | NO: 1556) |
| D4_PelB- | 1437) | | (SEQ ID NO: | |
| F_2020- | | | 1520) | |
| 06- | | | | |
| 19_G09 | | | | |
| SARS2- | QPVLTQPPSASG | VNWYQQLPGTA | HRPSGVPDRFSG | FGGGTKLT |
| R3-G1- | TPGQRVTISCSG | PKLLIY (SEQ ID | SKSGNTASLTISG | VL (SEQ ID |
| P1- | G (SEQ ID NO: | NO: 543) | LQAEDEADYYC | NO: 549) |
| B6_PelB- | 1438) | | (SEQ ID NO: | |
| F_2020- | | | 1521) | |
| 06- | | | | |
| 19_E02 | | | | |
| SARS2- | QPVLTQPPSVSV | ASWYQQKPGQS | KRPSGIPERFSGS | FGTGTKVT |
| R3-G3- | SPGQTASITCSG | PVLVIY (SEQ ID | NSGNTATLTISET | VL (SEQ ID |
| P1- | D (SEQ ID NO: | NO: 1479) | QAMDEADYYC | NO: 573) |
| G8_PelB- | 1439) | | (SEQ ID NO: | |
| F_2020- | | | 1522) | |
| 06- | | | | |
| 25_A05 | | | | |
| SARS2- | SYELTQPPSVSV | AYWYRQRPGQA | ERPSGIPERFSGS | FGGGTKLT |
| R3-G1- | SPGQTATITCSG | PVLVIY (SEQ ID | SSGTTVTLTISGV | VL (SEQ ID |
| P1- | D (SEQ ID NO: | NO: 1480) | QAEDEADYYC | NO: 549) |
| F11_PelB- | 1440) | | (SEQ ID NO: | |
| F_2020- | | | 1512) | |
| 06- | | | | |
| 25_B05 | | | | |
| SARS2- | QSVLTQPPSASG | VSWYQQHPGKA | KRPSGVPDRFSG | FGTGTEVT |
| R3-T1- | SPGQSVTISCTG | PKVLIY (SEQ ID | SKSGNTASLTVS | VL (SEQ ID |
| P3- | T (SEQ ID NO: | NO: 1481) | GLQAEDEADYY | NO: 1557) |
| F4_PelB- | 574) | | C (SEQ ID NO: | |
| F_2020- | | | 676) | |
| 06- | | | | |
| 20_C03 | | | | |
| SARS2- | QSVLTQPPSASG | VSWYQHHPGKA | KRPSGVPDRFSG | FGTGTKVT |
| R3-G1- | SPGHSVTISCTG | PKLMIY (SEQ ID | SKSGNTASLSVS | VL (SEQ ID |
| P2- | T (SEQ ID NO: | NO: 1460) | GLQAEDEADYY | NO: 573) |
| B8_PelB- | 1441) | | C (SEQ ID NO: | |
| F_2020- | | | 1523) | |
| 06- | | | | |
| 25_C06 | | | | |
| SARS2- | NFMLTQPHSVS | VQWYQQRPGSS | QRPSGVPDRFSG | FGGGTKLT |
| R3-G1- | ESPGKTVAISCT | PTTVIY (SEQ ID | SIDSSSNSASLTIS | VL (SEQ ID |
| P2- | RS (SEQ ID NO: | NO: 547) | GLKTEDEADYY | NO: 549) |
| D3_PelB- | 1442) | | C (SEQ ID NO: | |
| F_2020- | | | 616) | |
| 06- | | | | |
| 25_C12 | | | | |
| SARS2- | LPMLTQPPSMS | VNWYQQVPGTA | QRPSGVPDRFSG | IGGGTKLT |
| R3-G1- | GTPGQRVTISCS | PKVLIY (SEQ ID | SKSGTSASLAISG | VL (SEQ ID |
| P4- | GS (SEQ ID NO: | NO: 1482) | LRSEDEADYSC | NO: 1558) |
| C5_PelB- | 1443) | | (SEQ ID NO: | |
| F_2020- | | | 1524) | |
| 06- | | | | |
| 25_C07 | | | | |
| SARS2- | SYELTQPPSVSK | ASWLQHHQGHP | NRPSGISERFSAS | FGTGTKVT |
| R3-G1- | GLRQTATLTCT | PKLLSY (SEQ ID | RSGNTASLTITGL | VL (SEQ ID |
| P2- | GN (SEQ ID NO: | NO: 1483) | QPEDEADYYC | NO: 573) |
| D6_PelB- | 1444) | | (SEQ ID NO: | |
| F_2020- | | | 1525) | |
| 06- | | | | |
| 25_D02 | | | | |
| SARS2- | SYELTQPPSVSV | VSWYQQKPGHS | KRPSGIPERFSGS | FGGGTKLA |
| R3-G1- | SPGQTATITCSG | PLLVIY (SEQ ID | NSGNRAILTINGT | VL (SEQ ID |
| P1- | D (SEQ ID NO: | NO: 1484) | QALDEADYYC | NO: 665) |
| B7_PelB- | 1440) | | (SEQ ID NO: | |
| F_2020- | | | 1526) | |
| 06- | | | | |
| 25_A03 | | | | |
| 95_PelB- | ETTLTQSPGTLS | LAWYQQKPGQA | NRATGIPDRFSG | FGQGTKLE |
| F_2020- | LSPGERATLSCR | PRLLIY (SEQ ID | SGSGTDFTLTISS | IN (SEQ ID |
| 06- | AS (SEQ ID NO: | NO: 1459) | LQPEDFATYYC | NO: 1559) |
| 25_G11 | 1427) | | (SEQ ID NO: | |
| | | | 1527) | |
| 73_PelB- | DIVMTQSPATLS | LAWYQQRPGQA | TRATDIPDRFTGS | FGQGTKVE |
| F_2020- | VSPGERATLSCR | PRLLIS (SEQ ID | GSGTDFTLTISSL | SK (SEQ ID |
| 06- | AS (SEQ ID NO: | NO: 1485) | EPEDFAVYYC | NO: 1560) |
| 25_F09 | 1445) | | (SEQ ID NO: | |
| | | | 1528 | |
| SARS2- | QSVLTQPPSASG | VSWYQQHPGKA | KRPSGVPDRFSA | FGGGTTLT |
| R3-G3- | SPGQSVTVSCTG | PKLLIH (SEQ ID | SKSGNTASLTISG | VL (SEQ ID |
| P1- | T (SEQ ID NO: | NO: 1486) | LQPEDEGDYFC | NO: 673) |
| G9_PelB- | 1446) | | (SEQ ID NO: | |
| F_2020- | | | 1529) | |
| 06- | | | | |
| 25_B05 | | | | |
| SARS2- | QPVLTQPPSVSK | TAWLQQHQGHP | NRPSGVSERFSA | FGGGTKLT |
| R3-G1- | DLRQTATLTCT | PKLVSY (SEQ ID | SRSGNTASLTITG | VL (SEQ ID |
| P3- | GN (SEQ ID NO: | NO: 1487) | LQAEDEADYYC | NO: 549) |
| G7_PelB- | 1447) | | (SEQ ID NO: | |
| F_2020- | | | 1530) | |
| 06- | | | | |
| 25_H01 | | | | |
| SARS2- | NFMLTQPHSVS | VQWYQQRPGSA | QRPSGVPDRFSG | FGGGTKLT |
| R3-G1- | ESPGKTVTISCT | PTTVIY (SEQ ID | SIDSSSKTASLIIS | VP (SEQ ID |
| P4- | RS (SEQ ID NO: | NO: 615) | GLETEDEADYYC | NO: 1561) |
| A2_PelB- | 594) | | (SEQ ID NO: | |
| F_2020- | | | 1531) | |
| 06- | | | | |
| 25_A06 | | | | |
| SARS2- | QSVLTQPPSVSG | VHWYQQLPGTA | NRPSGVPDRFSG | FGGGTKLT |
| R3-G3- | APGQRVTISCTG | PKLIIY (SEQ ID | SKSGTSASLAITG | VL (SEQ ID |
| P1- | S (SEQ ID NO: | NO: 1472) | LQAEDEADYYC | NO: 549) |
| G1_PelB | 1448) | | (SEQ ID NO: | |
| -F_2020- | | | 1511) | |
| 06- | | | | |
| 25_F04 | | | | |
| SARS2- | QSALTQPASVS | VSWYQQHPASA | NRPSGVSNRFSG | FGTGTKVT |
| R3-G3- | GSPGQSITISCTG | PKLIIY (SEQ ID | SESGDTASLTISG | VL (SEQ ID |
| P1- | T (SEQ ID NO: | NO: 1488) | LRAEDEADYFC | NO: 573) |
| F1_PelB- | 654) | | (SEQ ID NO: | |
| F_2020- | | | 1532) | |
| 06- | | | | |
| 25_C04 | | | | |
| SARS2- | LPVLTQPPSASE | VNWYQQLPGTA | QRPSGVPDRFFG | FGGGTKLT |
| R3-G1- | TPGQRVTISCSG | PKLLIY (SEQ ID | SKSGTSASLAISG | VL (SEQ ID |
| P3- | G (SEQ ID NO: | NO: 543) | LQSEDEADYYC | NO: 549) |
| H10_PelB- | 1449) | | (SEQ ID NO: | |
| F_2020- | | | 1533) | |
| 06- | | | | |
| 25_H10 | | | | |
| 85_PelB- | QPVLTQPPSVSG | VHWYQQLPGTA | QRPSGVPDRFSG | FGGGTKVT |
| F_2020- | APGQSVTISCTG | PKLLIY (SEQ ID | SKSGTSASLAISG | VL (SEQ ID |
| 06- | S (SEQ ID NO: | NO: 715) | LOSEDEADYYC | NO: 593) |
| 25_G10 | 1450) | | (SEQ ID NO: 544) | |
| SARS2- | QSVLTQPPSASG | VYWYQRLPGTA | QRPSGVPDRFSG | FGTGTKVT |
| R3-G1- | TPGGRVTISCSG | PKLLIY (SEQ ID | SKSGTSASLAISG | VL (SEQ ID |
| P4- | S (SEQ ID NO: | NO: 1489) | LQSEDEADYFC | NO: 573) |
| A3_PelB- | 1451) | | (SEQ ID NO: | |
| F_2020- | | | 1534) | |
| 06- | | | | |
| 25_B06 | | | | |
| SARS2- | SSELTQDPAVSV | ANWYQQKSGQA | IRPSIPDRFSGSSS | VRRRIKLT |
| R3-G1- | ALGQTVRIICQG | PILVMY (SEQ ID | GNTASLTITGAQ. | VL (SEQ ID |
| P3- | D (SEQ ID NO: | NO: 1490) | EDEADYYC (SEQ | NO: 1562) |
| H6_PelB- | 1452) | | ID NO: 1535) | |
| F_2020- | | | | |
| 06- | | | | |
| 25_H08 | | | | |
| SARS2- | QSALTQPASVS | VSWYQQHPGKA | YRPSGISHRFSGS | FGTGTKVT |
| R3-G3- | GSPGQSITISCTG | PKLMIY (SEQ ID | KSGNTASLTISGL | VL (SEQ ID |
| P1- | T (SEQ ID NO: | NO: 627) | QAEDEADYYC | NO: 573) |
| G5_PelB- | 654) | | (SEQ ID NO: | |
| F_2020- | | | 1536) | |
| 06- | | | | |
| 25_H04 | | | | |
| SARS2- | SYELTQPPSVSV | AYWYQQRPGQA | ERSSGIPERFSGS | FGGGTKLT |
| R3-G1- | SPGQTASITCSG | PVLLIY (SEQ ID | GSGTTVTLTING | VL (SEQ ID |
| P4- | D (SEQ ID NO: | NO: 1491) | VQAEDEADYYC | NO: 549) |
| C10_PelB- | 1453) | | (SEQ ID NO: | |
| F_2020- | | | 1537) | |
| 06- | | | | |
| 25_F07 | | | | |
| SARS2- | LPVLTQPPSVSG | VHWYQQLPGAA | NRPSGVPDRFSG | FGGGTRLT |
| R3-G1- | APGQRVAISCTG | PKLLIY (SEQ ID | SKSGTSASLAISG | VL (SEQ ID |
| P1- | S (SEQ ID NO: | NO: 1492) | LRSEDEADYYC | NO: 937) |
| F10_PelB- | 1454) | | (SEQ ID NO: | |
| F_2020- | | | 1538) | |
| 06- | | | | |
| 25_B04 | | | | |
| SARS2- | QSVLTQPPSVSV | VHWYQQKAGQ | DRPSGIPERFSGS | FGGGTKLT |
| R3-T1- | APGQTARITCG | APVLVVH (SEQ | NSGNTATLTISR | VL (SEQ ID |
| P4- | GD (SEQ ID NO: | ID NO: 1493) | VEAGDEADYYC | NO: 549) |
| H4_PelB- | 1455) | | (SEQ ID NO: 660) | |
| F_2020- | | | | |
| 06- | | | | |
| 20 H04 | | | | |
| SARS2- | DIVMTQSPLSLP | LDWYLQKPGQS | NRASGVPDRFSG | FGQGTRLD |
| R3-G2- | VTPGEPASISCR | PQLLIH (SEQ ID | SGSDTDFTLKISR | IK (SEQ ID |
| P1- | SS (SEQ ID NO: | NO: 1494) | VEAEDVGVYYC | NO: 1563) |
| E8_PelB- | 1456) | | (SEQ ID NO: | |
| F_2020- | | | 1539) | |
| 06- | | | | |
| 25_A02 | | | | |
| SARS2- | QSVLTQPPSVSG | VHWYQQLPGTA | IRPSGVPDRFSAS | FGGGTKLT |
| R3-G1- | APGERVTFSCTG | PKLLIY (SEQ ID | KSGTSASLAITGL | VL (SEQ ID |
| P1- | T (SEQ ID NO: | NO: 715) | QSEDEGDYYC | NO: 549) |
| C3_PelB- | 1457) | | SEQ ID NO: | |
| F_2020- | | | 1540) | |
| 06- | | | | |
| 25_A07 | | | | |
| SARS2- | QSVLTQPPSASG | VSWYQQHPGKA | KRPSGVPDRFSG | FGTGTEVT |
| R3-G3- | SPGQSVTISCTG | PKVLIY (SEQ ID | SKSGNTASLTVS | VL (SEQ ID |
| P1- | T (SEQ ID NO: | NO: 1481) | GLQAEDEADYY | NO: 1557) |
| G2_PelB- | 574) | | C (SEQ ID NO: | |
| F_2020- | | | 676) | |
| 06- | | | | |
| 25_G04 | | | | |
| SARS2- | NFMLTQPHSVS | VQWYQQRPGSA | QRPSGVPDRFSA | FGGGTKLT |
| R3-G1- | ESPGKTVTISCT | PTTVIY (SEQ ID | SIDSSSNSASLTIS | VL (SEQ ID |
| P4- | RS (SEQ ID NO: | NO: 615) | GLKAEDEADYY | NO: 549) |
| D1_PelB- | 594) | | C (SEQ ID NO: | |
| F_2020- | | | 1541) | |
| 06- | | | | |
| 25_A08 | | | | |

[0274] The asterisks noted in the tables herein are read as a Q (glutamine) in the amino acid sequences described in the tables herein.

[0275] Antibodies

[0276] As used herein, the term “antibody” can refer to immunoglobulin molecules and immunologically active portions of immunoglobulin (Ig) molecules, i.e., molecules that contain an antigen binding site that specifically binds (immunoreacts with) an antigen. By “specifically binds” or “immunoreacts with” is meant that the antibody reacts with one or more antigenic determinants of the desired antigen and does not react with other polypeptides. Antibodies can include, but are not limited to, polyclonal, monoclonal, and chimeric antibodies. In some embodiments, the antibodies described herein are directed to SARS-CoV2.

[0277] For example, the antibodies described herein are directed to SARS-CoV2 having NCBI Reference Sequence: NC_045512 (amino acid residues 1-7116; SEQ ID NO: 979):

MESLVPGFNEKTHVQLSLPVLQVRDVLVRGFGDSVEEVLSEARQHLKDGTCGLVEVEKGVLPQLEQP
YVFIKRSDARTAPHGHVMVELVAELEGIQYGRSGETLGVLVPHVGEIPVAYRKVLLRKNGNKGAGGH
SYGADLKSFDLGDELGTDPYEDFQENWNTKHSSGVTRELMRELNGGAYTRYVDNNFCGPDGYPLECI
KDLLARAGKASCTLSEQLDFIDTKRGVYCCREHEHEIAWYTERSEKSYELQTPFEIKLAKKFDTFNG
ECPNFVFPLNSIIKTIQPRVEKKKLDGFMGRIRSVYPVASPNECNQMCLSTLMKCDHCGETSWQTGD
FVKATCEFCGTENLTKEGATTCGYLPQNAVVKIYCPACHNSEVGPEHSLAEYHNESGLKTILRKGGR
TIAFGGCVFSYVGCHNKCAYWVPRASANIGCNHTGVVGEGSEGLNDNLLEILQKEKVNINIVGDFKL
NEEIAIILASFSASTSAFVETVKGLDYKAFKQIVESCGNFKVTKGKAKKGAWNIGEQKSILSPLYAF
ASEAARVVRSIFSRTLETAQNSVRVLQKAAITILDGISQYSLRLIDAMMFTSDLATNNLVVMAYITG
GVVQLTSQWLTNIFGTVYEKLKPVLDWLEEKFKEGVEFLRDGWEIVKFISTCACEIVGGQIVTCAKE
IKESVQTFFKLVNKFLALCADSIIIGGAKLKALNLGETFVTHSKGLYRKCVKSREETGLLMPLKAPK
EIIFLEGETLPTEVLTEEVVLKTGDLQPLEQPTSEAVEAPLVGTPVCINGLMLLEIKDTEKYCALAP
NMMVTNNTFTLKGGAPTKVTFGDDTVIEVQGYKSVNITFELDERIDKVLNEKCSAYTVELGTEVNEF
ACVVADAVIKTLQPVSELLTPLGIDLDEWSMATYYLFDESGEFKLASHMYCSFYPPDEDEEEGDCEE
EEFEPSTQYEYGTEDDYQGKPLEFGATSAALQPEEEQEEDWLDDDSQQTVGQQDGSEDNQTTTIQTI
VEVQPQLEMELTPVVQTIEVNSFSGYLKLTDNVYIKNADIVEEAKKVKPTVVVNAANVYLKHGGGVA
GALNKATNNAMQVESDDYIATNGPLKVGGSCVLSGHNLAKHCLHVVGPNVNKGEDIQLLKSAYENFN
QHEVLLAPLLSAGIFGADPIHSLRVCVDTVRTNVYLAVFDKNLYDKLVSSFLEMKSEKQVEQKIAEI
PKEEVKPFITESKPSVEQRKQDDKKIKACVEEVTTTLEETKFLTENLLLYIDINGNLHPDSATLVSD
IDITFLKKDAPYIVGDVVQEGVLTAVVIPTKKAGGTTEMLAKALRKVPTDNYITTYPGQGLNGYTVE
EAKTVLKKCKSAFYILPSIISNEKQEILGTVSWNLREMLAHAEETRKLMPVCVETKAIVSTIQRKYK
GIKIQEGVVDYGARFYFYTSKTTVASLINTLNDLNETLVTMPLGYVTHGLNLEEAARYMRSLKVPAT
VSVSSPDAVTAYNGYLTSSSKTPEEHFIETISLAGSYKDWSYSGQSTQLGIEFLKRGDKSVYYTSNP
TTFHLDGEVITFDNLKTLLSLREVRTIKVFTTVDNINLHTQVVDMSMTYGQQFGPTYLDGADVTKIK
PHNSHEGKTFYVLPNDDTLRVEAFEYYHTTDPSFLGRYMSALNHTKKWKYPQVNGLTSIKWADNNCY
LATALLTLQQIELKFNPPALQDAYYRARAGEAANFCALILAYCNKTVGELGDVRETMSYLFQHANLD
SCKRVLNVVCKTCGQQQTTLKGVEAVMYMGTLSYEQFKKGVQIPCTCGKQATKYLVQQESPFVMMSA
PPAQYELKHGTFTCASEYTGNYQCGHYKHITSKETLYCIDGALLTKSSEYKGPITDVFYKENSYTTT
IKPVTYKLDGVVCTEIDPKLDNYYKKDNSYFTEQPIDLVPNQPYPNASFDNFKFVCDNIKFADDLNQ
LTGYKKPASRELKVTFFPDLNGDVVAIDYKHYTPSFKKGAKLLHKPIVWHVNNATNKATYKPNTWCI
RCLWSTKPVETSNSFDVLKSEDAQGMDNLACEDLKPVSEEVVENPTIQKDVLECNVKTTEVVGDIIL
KPANNSLKITEEVGHTDLMAAYVDNSSLTIKKPNELSRVLGLKTLATHGLAAVNSVPWDTIANYAKP
FLNKVVSTTTNIVTRCLNRVCTNYMPYFFTLLLQLCTFTRSTNSRIKASMPTTIAKNTVKSVGKFCL
EASFNYLKSPNFSKLINIIIWFLLLSVCLGSLIYSTAALGVLMSNLGMPSYCTGYREGYLNSTNVTI
ATYCTGSIPCSVCLSGLDSLDTYPSLETIQITISSFKWDLTAFGLVAEWFLAYILFTRFFYVLGLAA
IMQLFFSYFAVHFISNSWLMWLIINLVQMAPISAMVRMYIFFASFYYVWKSYVHVVDGCNSSTCMMC
YKRNRATRVECTTIVNGVRRSFYVYANGGKGFCKLHNWNCVNCDTFCAGSTFISDEVARDLSLQFKR
PINPTDQSSYIVDSVTVKNGSIHLYFDKAGQKTYERHSLSHFVNLDNLRANNTKGSLPINVIVFDGK
SKCEESSAKSASVYYSQLMCQPILLLDQALVSDVGDSAEVAVKMFDAYVNTFSSTFNVPMEKLKTLV
ATAEAELAKNVSLDNVLSTFISAARQGFVDSDVETKDVVECLKLSHQSDIEVTGDSCNNYMLTYNKV
ENMTPRDLGACIDCSARHINAQVAKSHNIALIWNVKDFMSLSEQLRKQIRSAAKKNNLPFKLTCATT
RQVVNVVTTKIALKGGKIVNNWLKQLIKVTLVFLFVAAIFYLITPVHVMSKHTDFSSEIIGYKAIDG
GVTRDIASTDTCFANKHADFDTWFSQRGGSYTNDKACPLIAAVITREVGFVVPGLPGTILRTTNGDF
LHFLPRVFSAVGNICYTPSKLIEYTDFATSACVLAAECTIFKDASGKPVPYCYDTNVLEGSVAYESL
RPDTRYVLMDGSIIQFPNTYLEGSVRVVTTFDSEYCRHGTCERSEAGVCVSTSGRWVLNNDYYRSLP
GVFCGVDAVNLLTNMFTPLIQPIGALDISASIVAGGIVAIVVTCLAYYFMRFRRAFGEYSHVVAFNT
LLFLMSFTVLCLTPVYSFLPGVYSVIYLYLTFYLTNDVSFLAHIQWMVMFTPLVPFWITIAYIICIS
TKHFYWFFSNYLKRRVVFNGVSFSTFEEAALCTFLLNKEMYLKLRSDVLLPLTQYNRYLALYNKYKY
FSGAMDTTSYREAACCHLAKALNDFSNSGSDVLYQPPQTSITSAVLQSGFRKMAFPSGKVEGCMVQV
TCGTTTLNGLWLDDVVYCPRHVICTSEDMLNPNYEDLLIRKSNHNFLVQAGNVQLRVIGHSMQNCVL
KLKVDTANPKTPKYKFVRIQPGQTFSVLACYNGSPSGVYQCAMRPNFTIKGSFLNGSCGSVGFNIDY
DCVSFCYMHHMELPTGVHAGTDLEGNFYGPFVDRQTAQAAGTDTTITVNVLAWLYAAVINGDRWFLN
RFTTTLNDFNLVAMKYNYEPLTQDHVDILGPLSAQTGIAVLDMCASLKELLQNGMNGRTILGSALLE
DEFTPFDVVRQCSGVTFQSAVKRTIKGTHHWLLLTILTSLLVLVQSTQWSLFFFLYENAFLPFAMGI
IAMSAFAMMFVKHKHAFLCLFLLPSLATVAYFNMVYMPASWVMRIMTWLDMVDTSLSGFKLKDCVMY
ASAVVLLILMTARTVYDDGARRVWTLMNVLTLVYKVYYGNALDQAISMWALIISVTSNYSGVVTTVM
FLARGIVEMCVEYCPIFFITGNTLQCIMLVYCFLGYFCTCYFGLFCLLNRYFRLTLGVYDYLVSTQE
FRYMNSQGLLPPKNSIDAFKLNIKLLGVGGKPCIKVATVQSKMSDVKCTSVVLLSVLQQLRVESSSK
LWAQCVQLHNDILLAKDTTEAFEKMVSLLSVLLSMQGAVDINKLCEEMLDNRATLQAIASEFSSLPS
YAAFATAQEAYEQAVANGDSEVVLKKLKKSLNVAKSEFDRDAAMQRKLEKMADQAMTQMYKQARSED
KRAKVTSAMQTMLFTMLRKLDNDALNNIINNARDGCVPLNIIPLTTAAKLMVVIPDYNTYKNTCDGT
TFTYASALWEIQQVVDADSKIVQLSEISMDNSPNLAWPLIVTALRANSAVKLQNNELSPVALRQMSC
AAGTTQTACTDDNALAYYNTTKGGRFVLALLSDLQDLKWARFPKSDGTGTIYTELEPPCRFVTDTPK
GPKVKYLYFIKGLNNLNRGMVLGSLAATVRLQAGNATEVPANSTVLSFCAFAVDAAKAYKDYLASGG
QPITNCVKMLCTHTGTGQAITVTPEANMDQESFGGASCCLYCRCHIDHPNPKGFCDLKGKYVQIPTT
CANDPVGFTLKNTVCTVCGMWKGYGCSCDQLREPMLQSADAQSFLNRVCGVSAARLTPCGTGTSTDV
VYRAFDIYNDKVAGFAKFLKTNCCRFQEKDEDDNLIDSYFVVKRHTFSNYQHEETIYNLLKDCPAVA
KHDFFKFRIDGDMVPHISRQRLTKYTMADLVYALRHFDEGNCDTLKEILVTYNCCDDDYFNKKDWYD
FVENPDILRVYANLGERVRQALLKTVQFCDAMRNAGIVGVLTLDNQDLNGNWYDFGDFIQTTPGSGV
PVVDSYYSLLMPILTLTRALTAESHVDTDLTKPYIKWDLLKYDFTEERLKLFDRYFKYWDQTYHPNC
VNCLDDRCILHCANFNVLFSTVFPPTSFGPLVRKIFVDGVPFVVSTGYHFRELGVVHNQDVNLHSSR
LSFKELLVYAADPAMHAASGNLLLDKRTTCFSVAALTNNVAFQTVKPGNFNKDFYDFAVSKGFFKEG
SSVELKHFFFAQDGNAAISDYDYYRYNLPTMCDIRQLLFVVEVVDKYFDCYDGGCINANQVIVNNLD
KSAGFPFNKWGKARLYYDSMSYEDQDALFAYTKRNVIPTITQMNLKYAISAKNRARTVAGVSICSTM
TNRQFHQKLLKSIAATRGATVVIGTSKFYGGWHNMLKTVYSDVENPHLMGWDYPKCDRAMPNMLRIM
ASLVLARKHTTCCSLSHRFYRLANECAQVLSEMVMCGGSLYVKPGGTSSGDATTAYANSVFNICQAV
TANVNALLSTDGNKIADKYVRNLQHRLYECLYRNRDVDTDFVNEFYAYLRKHFSMMILSDDAVVCFN
STYASQGLVASIKNFKSVLYYQNNVFMSEAKCWTETDLTKGPHEFCSQHTMLVKQGDDYVYLPYPDP
SRILGAGCFVDDIVKTDGTLMIERFVSLAIDAYPLTKHPNQEYADVFHLYLQYIRKLHDELTGHMLD
MYSVMLTNDNTSRYWEPEFYEAMYTPHTVLQAVGACVLCNSQTSLRCGACIRRPFLCCKCCYDHVIS
TSHKLVLSVNPYVCNAPGCDVTDVTQLYLGGMSYYCKSHKPPISFPLCANGQVFGLYKNTCVGSDNV
TDFNAIATCDWTNAGDYILANTCTERLKLFAAETLKATEETFKLSYGIATVREVLSDRELHLSWEVG
KPRPPLNRNYVFTGYRVTKNSKVQIGEYTFEKGDYGDAVVYRGTTTYKLNVGDYFVLTSHTVMPLSA
PTLVPQEHYVRITGLYPTLNISDEFSSNVANYQKVGMQKYSTLQGPPGTGKSHFAIGLALYYPSARI
VYTACSHAAVDALCEKALKYLPIDKCSRIIPARARVECFDKFKVNSTLEQYVFCTVNALPETTADIV
VFDEISMATNYDLSVVNARLRAKHYVYIGDPAQLPAPRTLLTKGTLEPEYFNSVCRLMKTIGPDMFL
GTCRRCPAEIVDTVSALVYDNKLKAHKDKSAQCFKMFYKGVITHDVSSAINRPQIGVVREFLTRNPA
WRKAVFISPYNSQNAVASKILGLPTQTVDSSQGSEYDYVIFTQTTETAHSCNVNRFNVAITRAKVGI
LCIMSDRDLYDKLQFTSLEIPRRNVATLQAENVTGLFKDCSKVITGLHPTQAPTHLSVDTKFKTEGL
CVDIPGIPKDMTYRRLISMMGFKMNYQVNGYPNMFITREEAIRHVRAWIGFDVEGCHATREAVGTNL
PLQLGFSTGVNLVAVPTGYVDTPNNTDFSRVSAKPPPGDQFKHLIPLMYKGLPWNVVRIKIVQMLSD
TLKNLSDRVVFVLWAHGFELTSMKYFVKIGPERTCCLCDRRATCFSTASDTYACWHHSIGFDYVYNP
FMIDVQQWGFTGNLQSNHDLYCQVHGNAHVASCDAIMTRCLAVHECFVKRVDWTIEYPIIGDELKIN
AACRKVQHMVVKAALLADKFPVLHDIGNPKAIKCVPQADVEWKFYDAQPCSDKAYKIEELFYSYATH
SDKFTDGVCLFWNCNVDRYPANSIVCRFDTRVLSNLNLPGCDGGSLYVNKHAFHTPAFDKSAFVNLK
QLPFFYYSDSPCESHGKQVVSDIDYVPLKSATCITRCNLGGAVCRHHANEYRLYLDAYNMMISAGFS
LWVYKQFDTYNLWNTFTRLQSLENVAFNVVNKGHFDGQQGEVPVSIINNTVYTKVDGVDVELFENKT
TLPVNVAFELWAKRNIKPVPEVKILNNLGVDIAANTVIWDYKRDAPAHISTIGVCSMTDIAKKPTET
ICAPLTVFFDGRVDGQVDLFRNARNGVLITEGSVKGLQPSVGPKQASLNGVTLIGEAVKTQFNYYKK
VDGVVQQLPETYFTQSRNLQEFKPRSQMEIDFLELAMDEFIERYKLEGYAFEHIVYGDFSHSQLGGL
HLLIGLAKRFKESPFELEDFIPMDSTVKNYFITDAQTGSSKCVCSVIDLLLDDFVEIIKSQDLSVVS
KVVKVTIDYTEISFMLWCKDGHVETFYPKLQSSQAWQPGVAMPNLYKMQRMLLEKCDLQNYGDSATL
PKGIMMNVAKYTQLCQYLNTLTLAVPYNMRVIHFGAGSDKGVAPGTAVLRQWLPTGTLLVDSDLNDF
VSDADSTLIGDCATVHTANKWDLIISDMYDPKTKNVTKENDSKEGFFTYICGFIQQKLALGGSVAIK
ITEHSWNADLYKLMGHFAWWTAFVTNVNASSSEAFLIGCNYLGKPREQIDGYVMHANYIFWRNTNPI
QLSSYSLFDMSKFPLKLRGTAVMSLKEGQINDMILSLLSKGRLIIRENNRVVISSDVLVNN

[0278] In some embodiments, the antibodies described herein can be useful against SARS-CoV2 variants. For example, the variants can be: the UK variant B.1.1.7 (such as B.1.1.7 with S:E484K); the South African variant B.1.351; the California variant B.1.427; the California variant B.1.429; the Brazilian variant P.1; the Brazilian variant P.2; the New York variant B.1.526 (such as B.1.526 with S:E484K or B.1.526 with S:S477N); the New York variant B.1.526.1; the New York variant B.1.526.2, the amino acid mutations of each strain which can be accessed at https://outbreak.info/situation-reports #Lineage_Mutation, and is incorporated by reference in their entireties. For example, a variant of SARS-CoV2 has accession number YP_009724390.1. For example, a variant of SARS-CoV2 has accession number QHD43416.1.

[0279] The SARS-CoV2 variants can comprise, for instance, amino acid sequences having an identity to SEQ ID NO: 980 of at least about 65%, at least about 70%, at least about 75%, at least about 80%, at least about 85%, at least about 90%, at least about 91%, at least about 92%, at least about 93%, at least about 94%, at least about 95%, at least about 96%, at least about 97%, at least about 98%, or at least about 99%.

[0280] Antibody molecules obtained from humans relate to any of the classes IgG, IgM, IgA, IgE and IgD, which differ from one another by the nature of the heavy chain present in the molecule. Certain classes have subclasses as well, such as IgG₁, IgG₂, IgG₃, IgG₄. Furthermore, in humans, the light chain may be a kappa chain or a lambda chain. The term “antigen-binding site,” or “binding portion” refers to the part of the immunoglobulin molecule that participates in antigen binding. The antigen binding site is formed by amino acid residues of the N-terminal variable (“V”) regions of the heavy (“H”) and light (“L”) chains. Three highly divergent stretches within the V regions of the heavy and light chains, referred to as “hypervariable regions,” are interposed between more conserved flanking stretches known as “framework regions,” or “FRs”. Thus, the term “FR” can refer to amino acid sequences which are naturally found between, and adjacent to, hypervariable regions in immunoglobulins. In an antibody molecule, the three hypervariable regions of a light chain and the three hypervariable regions of a heavy chain are disposed relative to each other in three-dimensional space to form an antigen-binding surface. The antigen-binding surface is complementary to the three-dimensional surface of a bound antigen, and the three hypervariable regions of each of the heavy and light chains are referred to as “complementarity-determining regions,” or “CDRs.”

[0281] Minor variations in the amino acid sequences of proteins are provided by the antibodies described herein. The variations in the amino acid sequence can be when the sequence maintains at least about 30%, at least about 40%, at least about 50%, at least about 60%, at least about 70%, at least about 75%, at least about 80%, at least about 90%, at least about 95%, or at least about 99% amino acid identity to the SEQ ID NOS of the antibodies described herein. For example, conservative amino acid replacements can be utilized. Conservative replacements are those that take place within a family of amino acids that are related in their side chains, wherein the interchangeability of residues have similar side chains In certain embodiments, the antibodies described herein include variants. Such variants can include those having at least from about 46% to about 50% amino acid identity to the SEQ ID NOS of the antibodies described herein, or having at least from about 50.1% to about 55% amino acid identity to the SEQ ID NOS of the antibodies described herein, or having at least from about 55.10% to about 60% amino acid identity to the SEQ ID NOS of the antibodies described herein, or having from at least about 60.10% to about 65% amino acid identity to the SEQ ID NOS of the antibodies described herein, or having from about 65.10% to about 70% amino acid identity to the SEQ ID NOS of the antibodies described herein, or having at least from about 70.10% to about 75% amino acid identity to the SEQ ID NOS of the antibodies described herein, or having at least from about 75.10% to about 80% amino acid identity to the SEQ ID NOS of the antibodies described herein, or having at least from about 80.1% to about 85% amino acid identity to the SEQ ID NOS of the antibodies described herein, or having at least from about 85.10% to about 90% amino acid identity to the SEQ ID NOS of the antibodies described herein, or having at least from about 90.1% to about 95% amino acid identity to the SEQ ID NOS of the antibodies described herein, or having at least from about 95.1% to about 97% amino acid identity to the SEQ ID NOS of the antibodies described herein, or having at least from about 97.1% to about 99% amino acid identity to the SEQ ID NOS of the antibodies described herein.

[0282] The term “epitope” can include any protein determinant capable of specific binding to an immunoglobulin, a scFv, or a T-cell receptor. Epitopic determinants can consist of chemically active surface groupings of molecules such as amino acids or sugar side chains and usually have specific three-dimensional structural characteristics, as well as specific charge characteristics. For example, antibodies can be raised against N-terminal or C-terminal peptides of a polypeptide, for example the C terminal domain (CTD) of the spike protein SARS-CoV2. The spike protein of SARS-CoV2 has NCBI Reference Sequence: YP_009724390 (amino acid residues 1-1273; SEQ ID NO: 980) comprising sequence:

MFVFLVLLPLVSSQCVNLTTRTQLPPAYTNSFTRGVYYPDKVFRSSVLHSTQDLFLPFFSN
VTWFHAIHVSGTNGTKRFDNPVLPFNDGVYFASTEKSNIIRGWIFGTTLDSKTQSLLIVNN
ATNVVIKVCEFQFCNDPFLGVYYHKNNKSWMESEFRVYSSANNCTFEYVSQPFLMDLEGKQ
GNFKNLREFVFKNIDGYFKIYSKHTPINLVRDLPQGFSALEPLVDLPIGINITRFQTLLAL
HRSYLTPGDSSSGWTAGAAAYYVGYLQPRTFLLKYNENGTITDAVDCALDPLSETKCTLKS
FTVEKGIYQTSNFRVQPTESIVRFPNITNLCPFGEVFNATRFASVYAWNRKRISNCVADYS

[chemical structure]

[chemical structure]

[chemical structure]

[chemical structure]

[chemical structure]

[chemical structure]

KTSVDCTMYICGDSTECSNLLLQYGSFCTQLNRALTGIAVEQDKNTQEVFAQVKQIYKTPP
IKDFGGFNFSQILPDPSKPSKRSFIEDLLFNKVTLADAGFIKQYGDCLGDIAARDLICAQK
FNGLTVLPPLLTDEMIAQYTSALLAGTITSGWTFGAGAALQIPFAMQMAYRFNGIGVTQNV
LYENQKLIANQFNSAIGKIQDSLSSTASALGKLQDVVNQNAQALNTLVKQLSSNFGAISSV
LNDILSRLDKVEAEVQIDRLITGRLQSLQTYVTQQLIRAAEIRASANLAATKMSECVLGQS
KRVDFCGKGYHLMSFPQSAPHGVVFLHVTYVPAQEKNFTTAPAICHDGKAHFPREGVFVSN
GTHWFVTQRNFYEPQIITTDNTFVSGNCDVVIGIVNNTVYDPLQPELDSFKEELDKYFKNH
TSPDVDLGDISGINASVVNIQKEIDRLNEVAKNLNESLIDLQELGKYEQYIKWPWYIWLGF
IAGLIAIVMVTIMLCCMTSCCSCLKGCCSCGSCCKFDEDDSEPVLKGVKLHYT

[0283] In some embodiments, the epitope comprises a region within amino acids 319-490 of the spike protein of SARS-CoV2 having NCBI Reference Sequence YP_009724390. In some embodiments, the epitope comprises a region within amino acids 319-541 of the spike protein of SARS-CoV2 having NCBI Reference Sequence YP_009724390. The exemplary, italicized shadowed amino acid residues of SEQ ID NO: 980 correspond to amino acid mutations found in SARS-CoV2 variant strains (e.g., K417N or K417T, L452R, S477N, E484K, N501Y, A570D, D614G, A701V).

[0284] The terms “immunological binding,” and “immunological binding properties” can refer to the non-covalent interactions of the type which occur between an immunoglobulin molecule and an antigen for which the immunoglobulin is specific. The strength, or affinity of immunological binding interactions can be expressed in terms of the dissociation constant (K_{d}) of the interaction, wherein a smaller K_{d} represents a greater affinity. Immunological binding properties of selected polypeptides can be quantified using methods well known in the art. One such method entails measuring the rates of antigen-binding site/antigen complex formation and dissociation, wherein those rates depend on the concentrations of the complex partners, the affinity of the interaction, and geometric parameters that equally influence the rate in both directions. Thus, both the “on rate constant” (Kₒₙ) and the “off rate constant” (K_{off}) can be determined by calculation of the concentrations and the actual rates of association and dissociation. (See Nature 361:186-87 (1993)). The ratio of K_{off}/Kₒₙ allows the cancellation of all parameters not related to affinity, and is equal to the dissociation constant K_{d}. (See, generally, Davies et al. (1990) Annual Rev Biochem 59:439-473). An antibody of the present invention can specifically bind to a SARS-CoV2 epitope when the equilibrium binding constant (K_{D}) is ≤1 μM, ≤10 μM, ≤10 nM, ≤10 pM, or ≤100 pM to about 1 pM, as measured by assays such as radioligand binding assays or similar assays known to those skilled in the art, such as BIAcore or Octet (BLI). For example, in some embodiments, the K_{D} is between about 1E-12 M and a K_{D} about 1E-11 M. In some embodiments, the K_{D} is between about 1E-11 M and a K_{D} about 1E-10 M. In some embodiments, the K_{D} is between about 1E-10 M and a K_{D} about 1E-9 M. In some embodiments, the K_{D} is between about 1E-9 M and a K_{D} about 1E-8 M. In some embodiments, the K_{D} is between about 1E-8 M and a K_{D} about 1E-7 M. In some embodiments, the K_{D} is between about 1E-7 M and a K_{D} about 1E-6 M. For example, in some embodiments, the K_{D} is about 1E-12 M while in other embodiments the K_{D} is about 1E-11 M. In some embodiments, the K_{D} is about 1E-10 M while in other embodiments the K_{D} is about 1E-9 M. In some embodiments, the K_{D} is about 1E-8 M while in other embodiments the K_{D} is about 1E-7 M. In some embodiments, the K_{D} is about 1E-6 M while in other embodiments the K_{D} is about 1E-5 M. In some embodiments, for example, the K_{D} is about 3 E-11 M, while in other embodiments the K_{D} is about 3E-12 M. In some embodiments, the K_{D} is about 6E-11 M. “Specifically binds” or “has specificity to,” can refer to an antibody that binds to an epitope via its antigen-binding domain, and that the binding entails some complementarity between the antigen-binding domain and the epitope. For example, an antibody is said to “specifically bind” to an epitope when it binds to that epitope, via its antigen-binding domain more readily than it would bind to a random, unrelated epitope.

[0285] For example, the SARS-CoV2 antibody can be monovalent or bivalent, and comprises a single or double chain. Functionally, the binding affinity of the SARS-CoV2 antibody is within the range of 10⁻⁵M to 10⁻¹² M. For example, the binding affinity of the SARS-CoV2 antibody is from 10⁻⁶ M to 10⁻¹² M, from 10⁻⁷ M to 10⁻¹² M, from 10⁻⁸ M to 10⁻¹² M, from 10⁻⁹ M to 10⁻¹² M, from 10⁻⁵ M to 10⁻¹¹ M, from 10⁻⁶ M to 10⁻¹¹ M, from 10⁻⁷ M to 10⁻¹¹ M, from 10⁻⁸ M to 10⁻¹¹ M, from 10⁻⁹ M to 10⁻¹¹ M, from 10⁻¹⁰ M to 10⁻¹¹ M, from 10⁻⁵ M to 10⁻¹⁰M, from 10⁻⁶ M to 10⁻¹⁰ M, from 10⁻⁷ M to 10⁻¹⁰ M, from 10⁻⁸ M to 10⁻¹⁰M, from 10⁻⁹ M to 10⁻¹⁰ M, from 10⁻⁵ M to 10⁻⁹ M, from 10⁻⁶ M to 10⁻⁹M, from 10⁻⁷ M to 10⁻⁹ M, from 10⁻⁸ M to 10⁻⁹ M, from 10⁻⁵ M to 10⁻⁸ M, from 10⁻⁶ M to 10⁻⁸ M, from 10⁻⁷ M to 10⁻⁸ M, from 10⁻⁵ M to 10⁻⁷ M, from 10⁻⁶ M to 10⁻⁷ M, or from 10⁻⁵ M to 10⁻⁶ M.

[0286] A SARS-CoV2 protein or a derivative, fragment, analog, homolog or ortholog thereof, can be utilized as an immunogen in the generation of antibodies that immunospecifically bind these protein components.

[0287] Those skilled in the art will recognize that it is possible to determine, without undue experimentation, if a human monoclonal antibody has the same specificity as a human monoclonal antibody of the invention by ascertaining whether the former prevents the latter from binding to SARS-CoV2. If the human monoclonal antibody being tested competes with the human monoclonal antibody of the invention, as shown by a decrease in binding by the human monoclonal antibody of the invention, then it is likely that the two monoclonal antibodies bind to the same, or to a closely related, epitope.

[0288] Another way to determine whether a human monoclonal antibody has the specificity of a human monoclonal antibody of the invention is to pre-incubate the human monoclonal antibody of the invention with the SARS-CoV2 with which it is normally reactive, and then add the human monoclonal antibody being tested to determine if the human monoclonal antibody being tested is inhibited in its ability to bind SARS-CoV2. If the human monoclonal antibody being tested is inhibited then, in all likelihood, it has the same, or functionally equivalent, epitopic specificity as the monoclonal antibody of the invention.

[0289] Various procedures known within the art may be used for the production of polyclonal or monoclonal antibodies directed against a protein of the invention, or against derivatives, fragments, analogs homologs or orthologs thereof (See, for example, Antibodies: A Laboratory Manual, Harlow E, and Lane D, 1988, Cold Spring Harbor Laboratory Press, Cold Spring Harbor, NY, incorporated herein by reference).

[0290] Antibodies can be purified by well-known techniques, such as affinity chromatography using protein A or protein G, which provide primarily the IgG fraction of immune serum. Subsequently, or alternatively, the specific antigen which is the target of the immunoglobulin sought, or an epitope thereof, may be immobilized on a column to purify the immune specific antibody by immunoaffinity chromatography. Purification of immunoglobulins is discussed, for example, by D. Wilkinson (The Scientist, published by The Scientist, Inc., Philadelphia PA, Vol. 14, No. 8 (Apr. 17, 2000), pp. 25-28).

[0291] The term “monoclonal antibody” or “MAb” or “monoclonal antibody composition”, as used herein, can refer to a population of antibody molecules that contain only one molecular species of antibody molecule consisting of a unique light chain gene product and a unique heavy chain gene product. For example, the complementarity determining regions (CDRs) of the monoclonal antibody are identical in all the molecules of the population. MAbs contain an antigen binding site capable of immunoreacting with an epitope of the antigen characterized by a unique binding affinity for it.

[0292] Monoclonal antibodies can be prepared using hybridoma methods, such as those described by Kohler and Milstein, Nature, 256:495 (1975). In a hybridoma method, a mouse, hamster, or other appropriate host animal, is typically immunized with an immunizing agent to elicit lymphocytes that produce or are capable of producing antibodies that will specifically bind to the immunizing agent. Alternatively, the lymphocytes can be immunized in vitro.

[0293] The immunizing agent can include the protein antigen, a fragment thereof or a fusion protein thereof. For example, either peripheral blood lymphocytes are used if cells of human origin are desired, or spleen cells or lymph node cells are used if non-human mammalian sources are desired. The lymphocytes are then fused with an immortalized cell line using a suitable fusing agent, such as polyethylene glycol, to form a hybridoma cell (Goding, Monoclonal Antibodies: Principles and Practice, Academic Press, (1986) pp. 59-103). Immortalized cell lines are usually transformed mammalian cells, such as myeloma cells of rodent, bovine and human origin. Usually, rat or mouse myeloma cell lines are employed. The hybridoma cells can be cultured in a suitable culture medium that contains one or more substances that inhibit the growth or survival of the unfused, immortalized cells. For example, if the parental cells lack the enzyme hypoxanthine guanine phosphoribosyl transferase (HGPRT or HPRT), the culture medium for the hybridomas typically will include hypoxanthine, aminopterin, and thymidine (“HAT medium”), which substances prevent the growth of HGPRT-deficient cells.

[0294] Immortalized cell lines include those that fuse efficiently, support stable high level expression of antibody by the selected antibody-producing cells, and are sensitive to a medium such as HAT medium. Immortalized cell lines can also include murine myeloma lines, which can be obtained, for instance, from the Salk Institute Cell Distribution Center, San Diego, California and the American Type Culture Collection, Manassas, Virginia. Human myeloma and mouse-human heteromyeloma cell lines also have been described for the production of human monoclonal antibodies. (See Kozbor, J. Immunol., 133:3001 (1984); Brodeur et al., Monoclonal Antibody Production Techniques and Applications, Marcel Dekker, Inc., New York, (1987) pp. 51-63)).

[0295] The culture medium in which the hybridoma cells are cultured can then be assayed for the presence of monoclonal antibodies directed against the antigen. The binding specificity of monoclonal antibodies produced by the hybridoma cells is determined by immunoprecipitation or by an in vitro binding assay, such as radioimmunoassay (RIA) or enzyme-linked immunoabsorbent assay (ELISA). Such techniques and assays are known in the art. The binding affinity of the monoclonal antibody can, for example, be determined by the Scatchard analysis of Munson and Pollard, Anal. Biochem., 107:220 (1980). Moreover, in therapeutic applications of monoclonal antibodies, it is important to identify antibodies having a high degree of specificity and a high binding affinity for the target antigen.

[0296] After the desired hybridoma cells are identified, the clones can be subcloned by limiting dilution procedures and grown by standard methods. (See Goding, Monoclonal Antibodies: Principles and Practice, Academic Press, (1986) pp. 59-103). Suitable culture media for this purpose include, for example, Dulbecco's Modified Eagle's Medium and RPMI-1640 medium. Alternatively, the hybridoma cells can be grown in vivo as ascites in a mammal.

[0297] The monoclonal antibodies secreted by the subclones can be isolated or purified from the culture medium or ascites fluid by conventional immunoglobulin purification procedures such as, for example, protein A-Sepharose, hydroxylapatite chromatography, gel electrophoresis, dialysis, or affinity chromatography.

[0298] Monoclonal antibodies can also be made by recombinant DNA methods, such as those described in U.S. Pat. No. 4,816,567. DNA encoding the monoclonal antibodies of the invention can be readily isolated and sequenced using conventional procedures (e.g., by using oligonucleotide probes that are capable of binding specifically to genes encoding the heavy and light chains of murine antibodies). The hybridoma cells of the invention serve as a source of such DNA. Once isolated, the DNA can be placed into expression vectors, which are then transfected into host cells such as simian COS cells, Chinese hamster ovary (CHO) cells, or myeloma cells that do not otherwise produce immunoglobulin protein, to obtain the synthesis of monoclonal antibodies in the recombinant host cells. The DNA also can be modified, for example, by substituting the coding sequence for human heavy and light chain constant domains in place of the homologous murine sequences (see U.S. Pat. No. 4,816,567; Morrison, Nature 368, 812-13 (1994)) or by covalently joining to the immunoglobulin coding sequence all or part of the coding sequence for a non-immunoglobulin polypeptide. Such a non-immunoglobulin polypeptide can be substituted for the constant domains of an antibody of the invention, or can be substituted for the variable domains of one antigen-combining site of an antibody of the invention to create a chimeric bivalent antibody.

[0299] Fully human antibodies are antibody molecules in which the entire sequence of both the light chain and the heavy chain, including the CDRs, arise from human genes. Such antibodies are termed “human antibodies”, or “fully human antibodies” herein. Human monoclonal antibodies can be prepared by using trioma technique; the human B-cell hybridoma technique (see Kozbor, et al., 1983 Immunol Today 4: 72); and the EBV hybridoma technique to produce human monoclonal antibodies (see Cole, et al., 1985 In: MONOCLONAL ANTIBODIES AND CANCER THERAPY, Alan R. Liss, Inc., pp. 77-96). Human monoclonal antibodies may be utilized and may be produced by using human hybridomas (see Cote, et al., 1983. Proc Natl Acad Sci USA 80: 2026-2030) or by transforming human B-cells with Epstein Barr Virus in vitro (see Cole, et al., 1985 In: MONOCLONAL ANTIBODIES AND CANCER THERAPY, Alan R. Liss, Inc., pp. 77-96).

[0300] “Humanized antibodies” can be antibodies from a non-human species (such as mouse), whose amino acid sequences (for example, in the CDR regions) have been modified to increase their similarity to antibody variants produced in humans. Antibodies can be humanized by methods known in the art, such as CDR-grafting. See also, Safdari et al., (2013) Biotechnol Genet Eng Rev.; 29:175-86. In addition, humanized antibodies can be produced in transgenic plants, as an inexpensive production alternative to existing mammalian systems. For example, the transgenic plant may be a tobacco plant, i.e., Nicotiana benthamiana, and Nicotiana tabaccum. The antibodies are purified from the plant leaves. Stable transformation of the plants can be achieved through the use of Agrobacterium tumefaciens or particle bombardment. For example, nucleic acid expression vectors containing at least the heavy and light chain sequences are expressed in bacterial cultures, i.e., A. tumefaciens strain BLA4404, via transformation. Infiltration of the plants can be accomplished via injection. Soluble leaf extracts can be prepared by grinding leaf tissue in a mortar and by centrifugation. Isolation and purification of the antibodies can be readily be performed by many of the methods known to the skilled artisan in the art. Other methods for antibody production in plants are described in, for example, Fischer et al., Vaccine, 2003, 21:820-5; and Ko et al, Current Topics in Microbiology and Immunology, Vol. 332, 2009, pp. 55-78. As such, the present invention further provides any cell or plant comprising a vector that encodes the antibody of the present invention, or produces the antibody of the present invention.

[0301] In addition, human antibodies can also be produced using additional techniques, including phage display libraries. (See Hoogenboom and Winter, J. Mol. Biol., 227:381 (1991); Marks et al., J. Mol. Biol., 222:581 (1991)). Similarly, human antibodies can be made by introducing human immunoglobulin loci into transgenic animals, e.g., mice in which the endogenous immunoglobulin genes have been partially or completely inactivated. Upon challenge, human antibody production is observed, which closely resembles that seen in humans in all respects, including gene rearrangement, assembly, and antibody repertoire. This approach is described, for example, in U.S. Pat. Nos. 5,545,807; 5,545,806; 5,569,825; 5,625,126; 5,633,425; 5,661,016, and in Marks et al., Bio/Technology 10, 779-783 (1992); Lonberg et al., Nature 368 856-859 (1994); Morrison, Nature 368, 812-13 (1994); Fishwild et al, Nature Biotechnology 14, 845-51 (1996); Neuberger, Nature Biotechnology 14, 826 (1996); and Lonberg and Huszar, Intern. Rev. Immunol. 73 65-93 (1995).

[0302] Human antibodies can additionally be produced using transgenic nonhuman animals which are modified so as to produce fully human antibodies rather than the animal's endogenous antibodies in response to challenge by an antigen. (See PCT publication WO94/02602 and U.S. Pat. No. 6,673,986). The endogenous genes encoding the heavy and light immunoglobulin chains in the nonhuman host have been incapacitated, and active loci encoding human heavy and light chain immunoglobulins are inserted into the host's genome. The human genes are incorporated, for example, using yeast artificial chromosomes containing the requisite human DNA segments. An animal which provides all the desired modifications is then obtained as progeny by crossbreeding intermediate transgenic animals containing fewer than the full complement of the modifications. The embodiment of such a nonhuman animal is a mouse, and is termed the Xenomouse™ as disclosed in PCT publications WO 96/33735 and WO 96/34096. This animal produces B cells which secrete fully human immunoglobulins. The antibodies can be obtained directly from the animal after immunization with an immunogen of interest, as, for example, a preparation of a polyclonal antibody, or alternatively from immortalized B cells derived from the animal, such as hybridomas producing monoclonal antibodies. Additionally, the genes encoding the immunoglobulins with human variable regions can be recovered and expressed to obtain the antibodies directly, or can be further modified to obtain analogs of antibodies such as, for example, single chain Fv (scFv) molecules.

[0303] Thus, using such a technique, therapeutically useful IgG, IgA, IgM and IgE antibodies can be produced. For an overview of this technology for producing human antibodies, see Lonberg and Huszar Int. Rev. Immunol. 73:65-93 (1995). For a detailed discussion of this technology for producing human antibodies and human monoclonal antibodies and protocols for producing such antibodies, see, e.g., PCT publications WO 98/24893; WO 96/34096; WO 96/33735; U.S. Pat. Nos. 5,413,923; 5,625,126; 5,633,425; 5,569,825; 5,661,016; 5,545,806; 5,814,318; and 5,939,598, which are incorporated by reference herein in their entirety. In addition, companies such as Creative BioLabs (Shirley, NY) can be engaged to provide human antibodies directed against a selected antigen using technology similar to that described herein.

[0304] An example of a method of producing a nonhuman host, exemplified as a mouse, lacking expression of an endogenous immunoglobulin heavy chain is disclosed in U.S. Pat. No. 5,939,598. It can be obtained by a method, which includes deleting the J segment genes from at least one endogenous heavy chain locus in an embryonic stem cell to prevent rearrangement of the locus and to prevent formation of a transcript of a rearranged immunoglobulin heavy chain locus, the deletion being effected by a targeting vector containing a gene encoding a selectable marker; and producing from the embryonic stem cell a transgenic mouse whose somatic and germ cells contain the gene encoding the selectable marker.

[0305] One method for producing an antibody of interest, such as a human antibody, is disclosed in U.S. Pat. No. 5,916,771. This method includes introducing an expression vector that contains a nucleotide sequence encoding a heavy chain into one mammalian host cell in culture, introducing an expression vector containing a nucleotide sequence encoding a light chain into another mammalian host cell, and fusing the two cells to form a hybrid cell. The hybrid cell expresses an antibody containing the heavy chain and the light chain.

[0306] In a further improvement on this procedure, a method for identifying a clinically relevant epitope on an immunogen and a correlative method for selecting an antibody that binds immunospecifically to the relevant epitope with high affinity, are disclosed in PCT publication WO 99/53049.

[0307] The antibody can be expressed by a vector containing a DNA segment encoding the single chain antibody described herein.

[0308] These vectors can include liposomes, naked DNA, adjuvant-assisted DNA, gene gun, catheters, etc. Vectors can include chemical conjugates such as described in WO 93/64701, which has targeting moiety (e.g. a ligand to a cellular surface receptor), and a nucleic acid binding moiety (e.g. polylysine), viral vectors (e.g. a DNA or RNA viral vector), fusion proteins such as described in PCT/US 95/02140 (WO 95/22618) which is a fusion protein containing a target moiety (e.g. an antibody specific for a target cell) and a nucleic acid binding moiety (e.g. a protamine), plasmids, phage, etc. The vectors can be chromosomal, non-chromosomal or synthetic. Retroviral vectors can also be used, and include moloney murine leukemia viruses.

[0309] DNA viral vectors can also be used, and include pox vectors such as orthopox or avipox vectors, herpesvirus vectors such as a herpes simplex I virus (HSV) vector (see Geller, A. I. et al., J. Neurochem, 64:487 (1995); Lim, F., et al., in DNA Cloning: Mammalian Systems, D. Glover, Ed. (Oxford Univ. Press, Oxford England) (1995); Geller, A. I. et al., Proc Natl. Acad. Sci.: U.S.A. 90:7603 (1993); Geller, A. I., et al., Proc Natl. Acad. Sci USA 87:1149 (1990), Adenovirus Vectors (see LeGal LaSalle et al., Science, 259:988 (1993); Davidson, et al., Nat. Genet 3:219 (1993); Yang, et al., J. Virol. 69:2004 (1995) and Adeno-associated Virus Vectors (see Kaplitt, M. G. et al., Nat. Genet. 8:148 (1994).

[0310] Pox viral vectors introduce the gene into the cell's cytoplasm. Avipox virus vectors result in only a short-term expression of the nucleic acid. Adenovirus vectors, adeno-associated virus vectors and herpes simplex virus (HSV) vectors are useful for introducing the nucleic acid into neural cells. The adenovirus vector results in a shorter-term expression (about 2 months) than adeno-associated virus (about 4 months), which in turn is shorter than HSV vectors. The vector chosen will depend upon the target cell and the condition being treated. The introduction can be by standard techniques, e.g. infection, transfection, transduction or transformation. Examples of modes of gene transfer include e.g., naked DNA, CaPO₄ precipitation, DEAE dextran, electroporation, protoplast fusion, lipofection, cell microinjection, and viral vectors.

[0311] The vector can be employed to target essentially any desired target cell. For example, stereotaxic injection can be used to direct the vectors (e.g. adenovirus, HSV) to a desired location. Additionally, the particles can be delivered by intracerebroventricular (icv) infusion using a minipump infusion system, such as a SynchroMed Infusion System. A method based on bulk flow, termed convection, has also proven effective at delivering large molecules to extended areas of the brain and may be useful in delivering the vector to the target cell. (See Bobo et al., Proc. Natl. Acad. Sci. USA 91:2076-2080 (1994); Morrison et al., Am. J. Physiol. 266:292-305 (1994)). Other methods that can be used include catheters, intravenous, parenteral, intraperitoneal and subcutaneous injection, and oral or other known routes of administration.

[0312] These vectors can be used to express large quantities of antibodies that can be used in a variety of ways. For example, to detect the presence of SARS-CoV2 in a sample. The antibody can also be used to try to bind to and disrupt SARS-CoV2.

[0313] In an embodiment, the antibodies of the present invention are full-length antibodies, containing an Fc region similar to wild-type Fc regions that bind to Fc receptors.

[0314] Heteroconjugate antibodies are also within the scope of the present invention. Heteroconjugate antibodies are composed of two covalently joined antibodies. It is contemplated that the antibodies can be prepared in vitro using known methods in synthetic protein chemistry, including those involving crosslinking agents. For example, immunotoxins can be constructed using a disulfide exchange reaction or by forming a thioether bond. Examples of suitable reagents for this purpose include iminothiolate and methyl-4-mercaptobutyrimidate and those disclosed, for example, in U.S. Pat. No. 4,676,980.

[0315] In embodiments, the antibody of the invention can be modified with respect to effector function, so as to enhance, e.g., the effectiveness of the antibody in neutralizing or preventing viral infection. For example, cysteine residue(s) can be introduced into the Fc region, thereby allowing interchain disulfide bond formation in this region. The homodimeric antibody thus generated can have improved internalization capability and/or increased complement-mediated cell killing and antibody-dependent cellular cytotoxicity (ADCC). (See Caron et al., J. Exp Med., 176: 1191-1195 (1992) and Shopes, J. Immunol., 148: 2918-2922 (1992)). Alternatively, an antibody can be engineered that has dual Fc regions and can thereby have enhanced complement lysis and ADCC capabilities. (See Stevenson et al., Anti-Cancer Drug Design, 3: 219-230 (1989)). In one embodiment, the antibody of the present invention has modifications of the Fc region, such that the Fc region does not bind to the Fc receptors. For example, the Fc receptor is Fcγ receptor. Antibodies with modification of the Fc region such that the Fc region does not bind to Fcγ, but still binds to neonatal Fc receptor are useful as described herein.

[0316] In certain embodiments, an antibody of the invention can comprise an Fc variant comprising an amino acid substitution which alters the antigen-independent effector functions of the antibody, in particular the circulating half-life of the antibody. Such antibodies exhibit either increased or decreased binding to FcRn when compared to antibodies lacking these substitutions, therefore, have an increased or decreased half-life in serum, respectively. Fc variants with improved affinity for FcRn are anticipated to have longer serum half-lives, and such molecules have useful applications in methods of treating mammals where long half-life of the administered antibody is desired, e.g., to treat a chronic disease or disorder. In contrast, Fc variants with decreased FcRn binding affinity are expected to have shorter halt-lives, and such molecules are also useful, for example, for administration to a mammal where a shortened circulation time can be advantageous, e.g., for in vivo diagnostic imaging or in situations where the starting antibody has toxic side effects when present in the circulation for prolonged periods. Fc variants with decreased FcRn binding affinity are also less likely to cross the placenta and, thus, are also useful in the treatment of diseases or disorders in pregnant women. In addition, other applications in which reduced FcRn binding affinity can be desired include those applications in which localization to the brain, kidney, and/or liver is desired. In one embodiment, the Fc variant-containing antibodies can exhibit reduced transport across the epithelium of kidney glomeruli from the vasculature. In another embodiment, the Fc variant-containing antibodies can exhibit reduced transport across the blood brain barrier (BBB) from the brain, into the vascular space. In one embodiment, an antibody with altered FcRn binding comprises an Fc domain having one or more amino acid substitutions within the “FcRn binding loop” of an Fc domain. The FcRn binding loop is comprised of amino acid residues 280-299 (according to EU numbering). Exemplary amino acid substitutions with altered FcRn binding activity are disclosed in PCT Publication No. WO05/047327 which is incorporated by reference herein. In certain exemplary embodiments, the antibodies, or fragments thereof, of the invention comprise an Fc domain having one or more of the following substitutions: V284E, H285E, N286D, K290E and S304D (EU numbering).

[0317] In some embodiments, mutations are introduced to the constant regions of the mAb such that the antibody dependent cell-mediated cytotoxicity (ADCC) activity of the mAb is altered. For example, the mutation is a LALA mutation in the CH2 domain. In one embodiment, the antibody (e.g., a human mAb, or a bispecific Ab) contains mutations on one scFv unit of the heterodimeric mAb, which reduces the ADCC activity. In another embodiment, the mAb contains mutations on both chains of the heterodimeric mAb, which completely ablates the ADCC activity. For example, the mutations introduced into one or both scFv units of the mAb are LALA mutations in the CH2 domain. These mAbs with variable ADCC activity can be optimized such that the mAbs exhibits maximal selective killing towards cells that express one antigen that is recognized by the mAb, however exhibits minimal killing towards the second antigen that is recognized by the mAb.

[0318] In other embodiments, antibodies of the invention for use in the diagnostic and treatment methods described herein have a constant region, e.g., an IgG₁ or IgG₄ heavy chain constant region, which can be altered to reduce or eliminate glycosylation. For example, an antibody of the invention can also comprise an Fc variant comprising an amino acid substitution which alters the glycosylation of the antibody. For example, the Fc variant can have reduced glycosylation (e.g., N- or O-linked glycosylation). In some embodiments, the Fc variant comprises reduced glycosylation of the N-linked glycan normally found at amino acid position 297 (EU numbering). In another embodiment, the antibody has an amino acid substitution near or within a glycosylation motif, for example, an N-linked glycosylation motif that contains the amino acid sequence NXT or NXS. In one embodiment, the antibody comprises an Fc variant with an amino acid substitution at amino acid position 228 or 299 (EU numbering). In more particular embodiments, the antibody comprises an IgG1 or IgG4 constant region comprising an S228P and a T299A mutation (EU numbering).

[0319] Exemplary amino acid substitutions which confer reduced or altered glycosylation are described in PCT Publication No, WO05/018572, which is incorporated by reference herein in its entirety. In some embodiments, the antibodies of the invention, or fragments thereof, are modified to eliminate glycosylation. Such antibodies, or fragments thereof, can be referred to as “agly” antibodies, or fragments thereof, (e.g. “agly” antibodies). While not wishing to be bound by theory “agly” antibodies, or fragments thereof, can have an improved safety and stability profile in vivo. Exemplary agly antibodies, or fragments thereof, comprise an aglycosylated Fc region of an IgG₄ antibody which is devoid of Fc-effector function thereby eliminating the potential for Fc mediated toxicity to the normal vital tissues. In yet other embodiments, antibodies of the invention, or fragments thereof, comprise an altered glycan. For example, the antibody can have a reduced number of fucose residues on an N-glycan at Asn297 of the Fc region, i.e., is afucosylated. In another embodiment, the antibody can have an altered number of sialic acid residues on the N-glycan at Asn297 of the Fc region.

[0320] The invention also pertains to immunoconjugates comprising an antibody conjugated to a cytotoxic agent such as a toxin (e.g., an enzymatically active toxin of bacterial, fungal, plant, or animal origin, or fragments thereof), or a radioactive isotope (i.e., a radioconjugate).

[0321] Enzymatically active toxins and fragments thereof that can be used include diphtheria A chain, nonbinding active fragments of diphtheria toxin, exotoxin A chain (from Pseudomonas aeruginosa), ricin A chain, abrin A chain, modeccin A chain, alpha-sarcin, Aleurites fordii proteins, dianthin proteins, Phytolaca americana proteins (PAPI, PAPII, and PAP-S), Momordica charantia inhibitor, curcin, crotin, Sapaonaria officinalis inhibitor, gelonin, mitogellin, restrictocin, phenomycin, enomycin, and the tricothecenes. A variety of radionuclides are available for the production of radioconjugated antibodies. Examples include ²¹²Bi, ¹³¹I, ¹³¹In, ⁹⁰Y, and ¹⁸⁶Re.

[0322] Conjugates of the antibody and cytotoxic agent are made using a variety of bifunctional protein-coupling agents such as N-succinimidyl-3-(2-pyridyldithiol) propionate (SPDP), iminothiolane (IT), bifunctional derivatives of imidoesters (such as dimethyl adipimidate HCL), active esters (such as disuccinimidyl suberate), aldehydes (such as glutaraldehyde), bis-azido compounds (such as bis (p-azidobenzoyl) hexanediamine), bis-diazonium derivatives (such as bis-(p-diazoniumbenzoyl)-ethylenediamine), diisocyanates (such as tolyene 2,6-diisocyanate), and bis-active fluorine compounds (such as 1,5-difluoro-2,4-dinitrobenzene). For example, a ricin immunotoxin can be prepared as described in Vitetta et al., Science 238: 1098 (1987). Carbon-14-labeled 1-isothiocyanatobenzyl-3-methyldiethylene triaminepentaacetic acid (MX-DTPA) is an exemplary chelating agent for conjugation of radionucleotide to the antibody. (See WO94/11026).

[0323] Those of ordinary skill in the art will recognize that a large variety of moieties can be coupled to the resultant antibodies or to other molecules of the invention. (See, for example, “Conjugate Vaccines”, Contributions to Microbiology and Immunology, J. M. Cruse and R. E. Lewis, Jr (eds), Carger Press, New York, (1989), the entire contents of which are incorporated herein by reference).

[0324] Coupling may be accomplished by any chemical reaction that will bind the two molecules so long as the antibody and the other moiety retain their respective activities. This linkage can include many chemical mechanisms, for instance covalent binding, affinity binding, intercalation, coordinate binding and complexation. The binding is, however, covalent binding. Covalent binding can be achieved either by direct condensation of existing side chains or by the incorporation of external bridging molecules. Many bivalent or polyvalent linking agents are useful in coupling protein molecules, such as the antibodies of the present invention, to other molecules. For example, representative coupling agents can include organic compounds such as thioesters, carbodiimides, succinimide esters, diisocyanates, glutaraldehyde, diazobenzenes and hexamethylene diamines. This listing is not intended to be exhaustive of the various classes of coupling agents known in the art but, rather, is exemplary of the more common coupling agents. (See Killen and Lindstrom, Jour. Immun. 133:1335-2549 (1984); Jansen et al., Immunological Reviews 62:185-216 (1982); and Vitetta et al., Science 238:1098 (1987)). Examples of linkers are described in the literature. (See, for example, Ramakrishnan, S. et al., Cancer Res. 44:201-208 (1984) describing use of MBS (M-maleimidobenzoyl-N-hydroxysuccinimide ester). See also, U.S. Pat. No. 5,030,719, describing use of halogenated acetyl hydrazide derivative coupled to an antibody by way of an oligopeptide linker. Useful linkers include: (i) EDC (1-ethyl-3-(3-dimethylamino-propyl) carbodiimide hydrochloride; (ii) SMPT (4-succinimidyloxycarbonyl-alpha-methyl-alpha-(2-pridyl-dithio)-toluene (Pierce Chem. Co., Cat. (21558G); (iii) SPDP (succinimidyl-6 [3-(2-pyridyldithio) propionamido]hexanoate (Pierce Chem. Co., Cat #21651G); (iv) Sulfo-LC-SPDP (sulfosuccinimidyl 6 [3-(2-pyridyldithio)-propianamide] hexanoate (Pierce Chem. Co. Cat. #2165-G); and (v) sulfo-NHS (N-hydroxysulfo-succinimide: Pierce Chem. Co., Cat. #24510) conjugated to EDC.

[0325] The linkers described above contain components that have different attributes, thus leading to conjugates with differing physio-chemical properties. For example, sulfo-NHS esters of alkyl carboxylates are more stable than sulfo-NHS esters of aromatic carboxylates. NHS-ester containing linkers are less soluble than sulfo-NHS esters. Further, the linker SMPT contains a sterically hindered disulfide bond, and can form conjugates with increased stability. Disulfide linkages, are in general, less stable than other linkages because the disulfide linkage is cleaved in vitro, resulting in less conjugate available. Sulfo-NHS, for example, can enhance the stability of carbodimide couplings. Carbodimide couplings (such as EDC) when used in conjunction with sulfo-NHS, forms esters that are more resistant to hydrolysis than the carbodimide coupling reaction alone.

[0326] The antibodies disclosed herein can also be formulated as immunoliposomes. Liposomes containing the antibody are prepared by methods known in the art, such as described in Epstein et al., Proc. Natl. Acad. Sci. USA, 82: 3688 (1985); Hwang et al., Proc. Natl Acad. Sci. USA, 77: 4030 (1980); and U.S. Pat. Nos. 4,485,045 and 4,544,545. Liposomes with enhanced circulation time are disclosed in U.S. Pat. No. 5,013,556.

[0327] Non-limiting example of useful liposomes can be generated by the reverse-phase evaporation method with a lipid composition comprising phosphatidylcholine, cholesterol, and PEG-derivatized phosphatidylethanolamine (PEG-PE). Liposomes are extruded through filters of defined pore size to yield liposomes with the desired diameter. Fab′ fragments of the antibody of the present invention can be conjugated to the liposomes as described in Martin et al., J. Biol. Chem., 257: 286-288 (1982) via a disulfide-interchange reaction.

[0328] The generation of neutralization escape mutants can be a helpful tool for identifying residues critical for neutralization and for investigating virus evolution under immune pressure (37, 49). Like other RNA viruses, CoVs have high mutation rates, especially during cross-species transmission, which is important for virus adaptation to new host receptors (5, 6, 50). Immune pressure is another force selecting virus mutation (37, 49). In addition, in view of current recommendations by the International Severe Acute Respiratory and Emerging Infection Consortium (ISARIC) and the increasing recognition that human Abs may have a role in the management of infectious diseases, the therapeutic potential of these nAbs should be considered for the prophylaxis and treatment of SARS (53). While escape from neutralization is a concern with therapeutic Abs, our study provides reagents and a strategy to mitigate this potential problem.

[0329] In another embodiment, the antibodies that neutralize infection by Severe Acute Respiratory Syndrome-associated coronavirus (SARS-CoV2) can be belong to various kinds of antibody classes and isotypes. For example, the neutralizing antibodies can be IgG₁, IgG₂, IgG₃ and/or IgG₄ isotype antibodies.

[0330] In another embodiment, the neutralizing antibodies can also contain LALA mutations in the Fc region. The LALA double mutants are characterized by the L234A L235A amino acid substitutions.

[0331] The humanized antibodies described herein can be produced in mammalian expression systems, such as hybridomas. The humanized antibodies described herein may also be produced by non-mammalian expression systems, for example, by transgenic plants. For example, the antibodies described herein are produced in transformed tobacco plants (N. benthamiana and N. tabaccum).

[0332] Use of Antibodies Against SARS-CoV2

[0333] Methods for the screening of antibodies that possess the desired specificity include, but are not limited to, enzyme linked immunosorbent assay (ELISA) and other immunologically mediated techniques known within the art.

[0334] Antibodies directed against a SARS-CoV2 protein disclosed herein can be useful in treatment of chronic infections, diseases, or medical conditions associated with COVID-19._Antibodies directed against a SARS-CoV2 protein, such as the spike protein, can be used in methods known within the art relating to the localization and/or quantitation of SARS-CoV2 (e.g., for use in measuring levels of the SARS-CoV2 protein within appropriate physiological samples, for use in diagnostic methods, for use in imaging the protein, and the like). In a given embodiment, antibodies specific to a SARS-CoV2, or derivative, fragment, analog or homolog thereof, that contain the antibody derived antigen binding domain, are utilized as pharmacologically active compounds (referred to hereinafter as “Therapeutics”).

[0335] An antibody specific for a SARS-CoV2 protein can be used to isolate a SARS-CoV2 polypeptide by standard techniques, such as immunoaffinity, chromatography or immunoprecipitation. Antibodies directed against a SARS-CoV2 protein (or a fragment thereof) can be used diagnostically to monitor protein levels in tissue as part of a clinical testing procedure, e.g., to, for example, determine the efficacy of a given treatment regimen. Detection can be facilitated by coupling (i.e., physically linking) the antibody to a detectable substance. Examples of detectable substances include various enzymes, prosthetic groups, fluorescent materials, luminescent materials, bioluminescent materials, and radioactive materials. Examples of suitable enzymes include horseradish peroxidase, alkaline phosphatase, β-galactosidase, or acetylcholinesterase; examples of suitable prosthetic group complexes include streptavidin/biotin and avidin/biotin; examples of suitable fluorescent materials include umbelliferone, fluorescein, fluorescein isothiocyanate, rhodamine, dichlorotriazinylamine fluorescein, dansyl chloride or phycoerythrin; an example of a luminescent material includes luminol; examples of bioluminescent materials include luciferase, luciferin, and aequorin, and examples of suitable radioactive material include ¹²⁵I, ¹³¹I, ³⁵S or ³H.

[0336] Antibodies of the invention, including polyclonal, monoclonal, humanized and fully human antibodies, can be used as therapeutic agents. Such agents will generally be employed to treat or prevent a SARS-CoV2 related disease or pathology in a subject. An antibody preparation, for example, one having high specificity and high affinity for its target antigen, is administered to the subject and will generally have an effect due to its binding with the target. Administration of the antibody may abrogate or inhibit or interfere with the internalization of the virus into a cell. In this case, the antibody binds to the target and prevents SARS-CoV2 binding the ACE2 receptor.

[0337] A therapeutically effective amount of an antibody of the invention relates generally to the amount needed to achieve a therapeutic objective. As noted above, this can be a binding interaction between the antibody and its target antigen that, in certain cases, interferes with the functioning of the target. The amount required to be administered will furthermore depend on the binding affinity of the antibody for its specific antigen, and will also depend on the rate at which an administered antibody is depleted from the free volume other subject to which it is administered. Common ranges for therapeutically effective dosing of an antibody or antibody fragment of the invention may be, by way of nonlimiting example, from about 0.1 mg/kg body weight to about 50 mg/kg body weight. Common dosing frequencies may range, for example, from twice daily to once a week.

[0338] Antibodies specifically binding a SARS-CoV2 protein or a fragment thereof of the invention, as well as other molecules identified by the screening assays disclosed herein, can be administered for the treatment of SARS-CoV2-related disorders in the form of pharmaceutical compositions. Principles and considerations involved in preparing such compositions, as well as guidance in the choice of components are provided, for example, in Remington: The Science And Practice Of Pharmacy 19th ed. (Alfonso R. Gennaro, et al., editors) Mack Pub. Co., Easton, Pa., 1995; Drug Absorption Enhancement: Concepts, Possibilities, Limitations, And Trends, Harwood Academic Publishers, Langhorne, Pa., 1994; and Peptide And Protein Drug Delivery (Advances In Parenteral Sciences, Vol. 4), 1991, M. Dekker, New York.

[0339] Embodiments of the present invention can comprise antibody fragments, such as antibody fragments lacking an Fc region. Peptide molecules can be designed that retain the ability to bind the target protein sequence. Such peptides can be synthesized chemically and/or produced by recombinant DNA technology. (See, e.g., Marasco et al., Proc. Natl. Acad. Sci. USA, 90: 7889-7893 (1993)). The formulation can also contain more than one active compound as necessary for the indication being treated, such as those with complementary activities that do not adversely affect each other. Alternatively, or in addition, the composition can comprise an agent that enhances its function, such as, for example, a cytotoxic agent, cytokine, chemotherapeutic agent, or growth-inhibitory agent. Such molecules are suitably present in combination in amounts that are effective for the purpose intended.

[0340] The active ingredients can also be entrapped in microcapsules prepared, for example, by coacervation techniques or by interfacial polymerization, for example, hydroxymethylcellulose or gelatin-microcapsules and poly-(methylmethacrylate) microcapsules, respectively, in colloidal drug delivery systems (for example, liposomes, albumin microspheres, microemulsions, nano-particles, and nanocapsules) or in macroemulsions.

[0341] The formulations to be used for in vivo administration must be sterile. This is readily accomplished by filtration through sterile filtration membranes.

[0342] Sustained-release preparations can be prepared. Suitable examples of sustained-release preparations include semipermeable matrices of solid hydrophobic polymers containing the antibody, which matrices are in the form of shaped articles, e.g., films, or microcapsules. Examples of sustained-release matrices include polyesters, hydrogels (for example, poly(2-hydroxyethyl-methacrylate), or poly(vinylalcohol)), polylactides (U.S. Pat. No. 3,773,919), copolymers of L-glutamic acid and γ ethyl-L-glutamate, non-degradable ethylene-vinyl acetate, degradable lactic acid-glycolic acid copolymers such as the LUPRON DEPOT™ (injectable microspheres composed of lactic acid-glycolic acid copolymer and leuprolide acetate), and poly-D-(−)-3-hydroxybutyric acid. While polymers such as ethylene-vinyl acetate and lactic acid-glycolic acid allows for release of molecules for over 100 days, certain hydrogels release proteins for shorter time periods.

[0343] An antibody according to the invention can be used as an agent for detecting the presence of a SARS-CoV2 (or a protein or a protein fragment thereof) in a sample. In embodiments, the antibody contains a detectable label. Antibodies can be polyclonal, or for example, monoclonal. In embodiments, the antibody is an intact antibody. The term “labeled”, with regard to the probe or antibody, can encompass direct labeling of the probe or antibody by coupling (i.e., physically linking) a detectable substance to the probe or antibody, as well as indirect labeling of the probe or antibody by reactivity with another reagent that is directly labeled. Examples of indirect labeling include detection of a primary antibody using a fluorescently-labeled secondary antibody and end-labeling of a DNA probe with biotin such that it can be detected with fluorescently-labeled streptavidin. The term “biological sample” can include tissues, cells and biological fluids isolated from a subject, as well as tissues, cells and fluids present within a subject. Included within the usage of the term “biological sample”, therefore, is blood and a fraction or component of blood including blood serum, blood plasma, or lymph. That is, the detection method of the invention can be used to detect an analyte mRNA, protein, or genomic DNA in a biological sample in vitro as well as in vivo. For example, in vitro techniques for detection of an analyte mRNA include Northern hybridizations and in situ hybridizations. In vitro techniques for detection of an analyte protein include enzyme linked immunosorbent assays (ELISAs), Western blots, immunoprecipitations, and immunofluorescence. In vitro techniques for detection of an analyte genomic DNA include Southern hybridizations. Procedures for conducting immunoassays are described, for example in “ELISA: Theory and Practice: Methods in Molecular Biology”, Vol. 42, J. R. Crowther (Ed.) Human Press, Totowa, N J, 1995; “Immunoassay”, E. Diamandis and T. Christopoulus, Academic Press, Inc., San Diego, C A, 1996; and “Practice and Theory of Enzyme Immunoassays”, P. Tijssen, Elsevier Science Publishers, Amsterdam, 1985. Furthermore, in vivo techniques for detection of an analyte protein include introducing into a subject a labeled anti-analyte protein antibody. For example, the antibody can be labeled with a radioactive marker whose presence and location in a subject can be detected by standard imaging techniques.

[0344] Chimeric Antigen Receptor (CAR) T-Cell Therapies

[0345] Cellular therapies, such as chimeric antigen receptor (CAR) T-cell therapies, are also provided herein. CAR T-cell therapies redirect a patient's T-cells to kill tumor cells by the exogenous expression of a CAR on a T-cell, for example. A CAR can be a membrane spanning fusion protein that links the antigen recognition domain of an antibody to the intracellular signaling domains of the T-cell receptor and co-receptor. A suitable cell can be used, for example, that can secrete an anti-SARS-CoV2 antibody of the present invention (or alternatively engineered to express an anti-SARS-CoV2 antibody as described herein to be secreted). The anti-SARS-CoV2 “payloads” to be secreted, can be, for example, minibodies, scFvs, IgG molecules, bispecific fusion molecules, and other antibody fragments as described herein. Upon contact or engineering, the cell described herein can then be introduced to a patient in need of a treatment by infusion therapies known to one of skill in the art. The patient may have a SARS-CoV2 disease, such as COVID-19. The cell (e.g., a T cell) can be, for instance, T lymphocyte, a CD4+ T cell, a CD8+ T cell, or the combination thereof, without limitation. Exemplary CARs and CAR factories useful in aspects of the invention include those disclosed in, for example, PCT/US2015/067225 and PCT/US2019/022272, each of which are hereby incorporated by reference in their entireties. In one embodiment, the SARS-CoV2 antibodies discussed herein can be used in the construction of the payload for a CAR-T cell. For example, in one embodiment, the anti-SARS-CoV2 antibodies discussed herein can be used for the targeting of the CARS (i.e., as the targeting moiety). In another embodiment, the anti-SARS-CoV2 antibodies discussed herein can be used as the targeting moiety, and a different SARS-CoV2 antibody that targets a different epitope can be used as the payload. In another embodiment, the payload can be an immunomodulatory antibody payload.

[0346] Pharmaceutical Compositions

[0347] The antibodies or agents of the invention (also referred to herein as “active compounds”), and derivatives, fragments, analogs and homologs thereof, can be incorporated into pharmaceutical compositions suitable for administration. Such compositions typically comprise the antibody or agent and a pharmaceutically acceptable carrier. As used herein, the term “pharmaceutically acceptable carrier” is intended to include any and all solvents, dispersion media, coatings, antibacterial and antifungal agents, isotonic and absorption delaying agents, and the like, compatible with pharmaceutical administration. Suitable carriers are described in the most recent edition of Remington's Pharmaceutical Sciences, a standard reference text in the field, which is incorporated herein by reference. Non-limiting examples of such carriers or diluents include, but are not limited to, water, saline, ringer's solutions, dextrose solution, and 5% human serum albumin. Liposomes and non-aqueous vehicles such as fixed oils may also be used. The use of such media and agents for pharmaceutically active substances is well known in the art. Except insofar as any conventional media or agent is incompatible with the active compound, use thereof in the compositions is contemplated. Supplementary active compounds can also be incorporated into the compositions.

[0348] A pharmaceutical composition of the invention is formulated to be compatible with its intended route of administration. Examples of routes of administration include parenteral, e.g., intravenous, intradermal, subcutaneous, oral (e.g., inhalation), transdermal (i.e., topical), transmucosal, and rectal administration. Solutions or suspensions used for parenteral, intradermal, or subcutaneous application can include the following components: a sterile diluent such as water for injection, saline solution, fixed oils, polyethylene glycols, glycerine, propylene glycol or other synthetic solvents; antibacterial agents such as benzyl alcohol or methyl parabens; antioxidants such as ascorbic acid or sodium bisulfite; chelating agents such as ethylenediaminetetraacetic acid (EDTA); buffers such as acetates, citrates or phosphates, and agents for the adjustment of tonicity such as sodium chloride or dextrose. The pH can be adjusted with acids or bases, such as hydrochloric acid or sodium hydroxide. The parenteral preparation can be enclosed in ampoules, disposable syringes or multiple dose vials made of glass or plastic.

[0349] Pharmaceutical compositions suitable for injectable use include sterile aqueous solutions (where water soluble) or dispersions and sterile powders for the extemporaneous preparation of sterile injectable solutions or dispersion. For intravenous administration, suitable carriers include physiological saline, bacteriostatic water, Cremophor EL™ (BASF, Parsippany, N.J.) or phosphate buffered saline (PBS). In all cases, the composition must be sterile and should be fluid to the extent that easy syringeability exists. It must be stable under the conditions of manufacture and storage and must be preserved against the contaminating action of microorganisms such as bacteria and fungi. The carrier can be a solvent or dispersion medium containing, for example, water, ethanol, polyol (for example, glycerol, propylene glycol, and liquid polyethylene glycol, and the like), and suitable mixtures thereof. The proper fluidity can be maintained, for example, by the use of a coating such as lecithin, by the maintenance of the required particle size in the case of dispersion and by the use of surfactants. Prevention of the action of microorganisms can be achieved by various antibacterial and antifungal agents, for example, parabens, chlorobutanol, phenol, ascorbic acid, thimerosal, and the like. In many cases, it will be useful to include isotonic agents, for example, sugars, polyalcohols such as manitol, sorbitol, sodium chloride in the composition. Prolonged absorption of the injectable compositions can be brought about by including in the composition an agent which delays absorption, for example, aluminum monostearate and gelatin.

[0350] Sterile injectable solutions can be prepared by incorporating the active compound in the required amount in an appropriate solvent with one or a combination of ingredients enumerated above, as required, followed by filtered sterilization. Dispersions can be prepared by incorporating the active compound into a sterile vehicle that contains a basic dispersion medium and the required other ingredients from those enumerated above. In the case of sterile powders for the preparation of sterile injectable solutions, methods of preparation are vacuum drying and freeze-drying that yields a powder of the active ingredient plus any additional desired ingredient from a previously sterile-filtered solution thereof.

[0351] Oral compositions generally include an inert diluent or an edible carrier. They can be enclosed in gelatin capsules or compressed into tablets. For the purpose of oral therapeutic administration, the active compound can be incorporated with excipients and used in the form of tablets, troches, or capsules. Oral compositions can also be prepared using a fluid carrier for use as a mouthwash, wherein the compound in the fluid carrier is applied orally and swished and expectorated or swallowed. Pharmaceutically compatible binding agents, and/or adjuvant materials can be included as part of the composition. The tablets, pills, capsules, troches and the like can contain any of the following ingredients, or compounds of a similar nature: a binder such as microcrystalline cellulose, gum tragacanth or gelatin; an excipient such as starch or lactose, a disintegrating agent such as alginic acid, Primogel, or corn starch; a lubricant such as magnesium stearate or Sterotes; a glidant such as colloidal silicon dioxide; a sweetening agent such as sucrose or saccharin; or a flavoring agent such as peppermint, methyl salicylate, or orange flavoring.

[0352] For administration by inhalation, the compounds are delivered in the form of an aerosol spray from pressured container or dispenser which contains a suitable propellant, e.g., a gas such as carbon dioxide, or a nebulizer.

[0353] Systemic administration can also be by transmucosal or transdermal means. For transmucosal or transdermal administration, penetrants appropriate to the barrier to be permeated are used in the formulation. Such penetrants are generally known in the art, and include, for example, for transmucosal administration, detergents, bile salts, and fusidic acid derivatives. Transmucosal administration can be accomplished through the use of nasal sprays or suppositories. For transdermal administration, the active compounds are formulated into ointments, salves, gels, or creams as generally known in the art.

[0354] The compounds can also be prepared in the form of suppositories (e.g., with conventional suppository bases such as cocoa butter and other glycerides) or retention enemas for rectal delivery.

[0355] In one embodiment, the active compounds are prepared with carriers that will protect the compound against rapid elimination from the body, such as a controlled release formulation, including implants and microencapsulated delivery systems. Biodegradable, biocompatible polymers can be used, such as ethylene vinyl acetate, polyanhydrides, polyglycolic acid, collagen, polyorthoesters, and polylactic acid. Methods for preparation of such formulations will be apparent to those skilled in the art. The materials can also be obtained commercially from Alza Corporation and Nova Pharmaceuticals, Inc. Liposomal suspensions (including liposomes targeted to infected cells with monoclonal antibodies to viral antigens) can also be used as pharmaceutically acceptable carriers. These can be prepared according to methods known to those skilled in the art, for example, as described in U.S. Pat. No. 4,522,811.

[0356] In embodiments, compositions, such as oral or parenteral compositions, can be formulated in dosage unit form for ease of administration and uniformity of dosage. Dosage unit form as used herein refers to physically discrete units suited as unitary dosages for the subject to be treated; each unit containing a predetermined quantity of active compound calculated to produce the desired therapeutic effect in association with the required pharmaceutical carrier. The specification for the dosage unit forms of the invention are dictated by and directly dependent on the unique characteristics of the active compound and the therapeutic effect to be achieved, and the limitations inherent in the art of compounding such an active compound for the treatment of individuals.

[0357] The pharmaceutical compositions can be included in a container, pack, or dispenser together with instructions for administration.

[0358] Screening Methods

[0359] The invention provides methods (also referred to herein as “screening assays”) for identifying modulators, i.e., candidate or test compounds or agents (e.g., peptides, peptidomimetics, small molecules or other drugs) that modulate or otherwise interfere with the fusion of a SARS-CoV2 to the cell membrane. Also provided are methods of identifying compounds useful to treat SARS-CoV2 infection. The invention also encompasses compounds identified using the screening assays described herein.

[0360] For example, the invention provides assays for screening candidate or test compounds which modulate the interaction between the SARS-CoV2 and the cell membrane. The test compounds of the invention can be obtained using any of the numerous approaches in combinatorial library methods known in the art, including: biological libraries; spatially addressable parallel solid phase or solution phase libraries; synthetic library methods requiring deconvolution; the “one-bead one-compound” library method; and synthetic library methods using affinity chromatography selection. The biological library approach is limited to peptide libraries, while the other four approaches are applicable to peptide, non-peptide oligomer or small molecule libraries of compounds. (See, e.g., Lam, 1997. Anticancer Drug Design 12: 145).

[0361] A “small molecule” as used herein, is meant to refer to a composition that has a molecular weight of less than about 5 kD, for example less than about 4 kD. Small molecules can be, e.g., nucleic acids, peptides, polypeptides, peptidomimetics, carbohydrates, lipids or other organic or inorganic molecules. Libraries of chemical and/or biological mixtures, such as fungal, bacterial, or algal extracts, are known in the art and can be screened with any of the assays of the invention.

[0362] Examples of methods for the synthesis of molecular libraries can be found in the art, for example in: DeWitt, et al., 1993. Proc. Natl. Acad. Sci. U.S.A. 90: 6909; Erb, et al., 1994. Proc. Natl. Acad. Sci. U.S.A. 91: 11422; Zuckermann, et al., 1994. J. Med. Chem. 37: 2678; Cho, et al., 1993. Science 261: 1303; Carrell, et al., 1994. Angew. Chem. Int. Ed. Engl. 33: 2059; Carell, et al., 1994. Angew. Chem. Int. Ed. Engl. 33: 2061; and Gallop, et al., 1994. J. Med. Chem. 37: 1233.

[0363] Libraries of compounds can be presented in solution (see e.g., Houghten, 1992, Biotechniques 13: 412-421), or on beads (see Lam, 1991. Nature 354: 82-84), on chips (see Fodor, 1993. Nature 364: 555-556), bacteria (see U.S. Pat. No. 5,223,409), spores (see U.S. Pat. No. 5,233,409), plasmids (see Cull, et al., 1992, Proc. Natl. Acad. Sci. USA 89: 1865-1869) or on phage (see Scott and Smith, 1990, Science 249: 386-390; Devlin, 1990, Science 249: 404-406; Cwirla, et al., 1990, Proc. Natl. Acad. Sci. U.S.A. 87: 6378-6382; Felici, 1991, J. Mol. Biol. 222: 301-310; and U.S. Pat. No. 5,233,409.).

[0364] In one embodiment, a candidate compound is introduced to an antibody-antigen complex and determining whether the candidate compound disrupts the antibody-antigen complex, wherein a disruption of this complex indicates that the candidate compound modulates the interaction between a SARS-CoV2 and the cell membrane.

[0365] In another embodiment, at least one SARS-CoV2 protein is provided, which is exposed to at least one neutralizing monoclonal antibody. Formation of an antibody-antigen complex is detected, and one or more candidate compounds are introduced to the complex. If the antibody-antigen complex is disrupted following introduction of the one or more candidate compounds, the candidate compounds is useful to treat a SARS-CoV2-related disease or disorder. For example, the at least one SARS-CoV2 protein can be provided as a SARS-CoV2 molecule.

[0366] Determining the ability of the test compound to interfere with or disrupt the antibody-antigen complex can be accomplished, for example, by coupling the test compound with a radioisotope or enzymatic label such that binding of the test compound to the antigen or biologically-active portion thereof can be determined by detecting the labeled compound in a complex. For example, test compounds can be labeled with ¹²¹I, ³⁵S, ¹⁴C, or ³H, either directly or indirectly, and the radioisotope detected by direct counting of radioemission or by scintillation counting. Alternatively, test compounds can be enzymatically-labeled with, for example, horseradish peroxidase, alkaline phosphatase, or luciferase, and the enzymatic label detected by determination of conversion of an appropriate substrate to product.

[0367] In one embodiment, the assay comprises contacting an antibody-antigen complex with a test compound, and determining the ability of the test compound to interact with the antigen or otherwise disrupt the existing antibody-antigen complex. In this embodiment, determining the ability of the test compound to interact with the antigen and/or disrupt the antibody-antigen complex comprises determining the ability of the test compound to bind to the antigen or a biologically-active portion thereof, as compared to the antibody.

[0368] In another embodiment, the assay comprises contacting an antibody-antigen complex with a test compound and determining the ability of the test compound to modulate the antibody-antigen complex. Determining the ability of the test compound to modulate the antibody-antigen complex can be accomplished, for example, by determining the ability of the antigen to bind to or interact with the antibody, in the presence of the test compound.

[0369] Those skilled in the art will recognize that, in any of the screening methods disclosed herein, the antibody can be a SARS-CoV2 neutralizing antibody or any variant thereof wherein the Fc region is modified such that it has reduced binding or does not bind to the Fc-gamma receptor. Additionally, the antigen can be a SARS-CoV2 protein, or a portion thereof.

[0370] The screening methods disclosed herein can be performed as a cell-based assay or as a cell-free assay. The cell-free assays of the invention are amenable to use of both the soluble form or the membrane-bound form of the proteins and fragments thereof. In the case of cell-free assays comprising the membrane-bound forms of the proteins, it may be desirable to utilize a solubilizing agent such that the membrane-bound form of the proteins are maintained in solution. Examples of such solubilizing agents include non-ionic detergents such as n-octylglucoside, n-dodecylglucoside, n-dodecylmaltoside, octanoyl-N-methylglucamide, decanoyl-N-methylglucamide, Triton® X-100, Triton® X-114, Thesit®, Isotridecypoly(ethylene glycol ether)ₙ, N-dodecyl-N,N-dimethyl-3-ammonio-1-propane sulfonate, 3-(3-cholamidopropyl) dimethylamminiol-1-propane sulfonate (CHAPS), or 3-(3-cholamidopropyl)dimethylamminiol-2-hydroxy-1-propane sulfonate (CHAPSO).

[0371] In more than one embodiment, it can be desirable to immobilize either the antibody or the antigen to facilitate separation of complexed from uncomplexed forms of one or both following introduction of the candidate compound, as well as to accommodate automation of the assay. Observation of the antibody-antigen complex in the presence and absence of a candidate compound can be accomplished in any vessel suitable for containing the reactants. Examples of such vessels include microtiter plates, test tubes, and micro-centrifuge tubes. In one embodiment, a fusion protein can be provided that adds a domain that allows one or both of the proteins to be bound to a matrix. For example, GST-antibody fusion proteins or GST-antigen fusion proteins can be adsorbed onto glutathione Sepharose beads (Sigma Chemical, St. Louis, MO) or glutathione derivatized microtiter plates, that are then combined with the test compound, and the mixture is incubated under conditions conducive to complex formation (e.g., at physiological conditions for salt and pH). Following incubation, the beads or microtiter plate wells are washed to remove any unbound components, the matrix immobilized in the case of beads, complex determined either directly or indirectly. Alternatively, the complexes can be dissociated from the matrix, and the level of antibody-antigen complex formation can be determined using standard techniques.

[0372] Other techniques for immobilizing proteins on matrices can also be used in the screening assays of the invention. For example, either the antibody or the antigen (e.g. the can be immobilized utilizing conjugation of biotin and streptavidin. Biotinylated antibody or antigen molecules can be prepared from biotin-NHS (N-hydroxy-succinimide) using techniques well-known within the art (e.g., biotinylation kit, Pierce Chemicals, Rockford, Ill.), and immobilized in the wells of streptavidin-coated 96 well plates (Pierce Chemical). Alternatively, other antibodies reactive with the antibody or antigen of interest, but which do not interfere with the formation of the antibody-antigen complex of interest, can be derivatized to the wells of the plate, and unbound antibody or antigen trapped in the wells by antibody conjugation. Methods for detecting such complexes, in addition to those described above for the GST-immobilized complexes, include immunodetection of complexes using such other antibodies reactive with the antibody or antigen.

[0373] The invention further pertains to new agents identified by any of the aforementioned screening assays and uses thereof for treatments as described herein.

[0374] Diagnostic Assays

[0375] Antibodies of the present invention can be detected by or used for detection purposes by appropriate assays, e.g., conventional types of immunoassays such as sandwich ELISAs. For example, an assay can be performed in which a SARS-CoV2 or fragment thereof is affixed to a solid phase. Incubation is maintained for a sufficient period of time to allow the antibody in the sample to bind to the immobilized polypeptide on the solid phase. After this first incubation, the solid phase is separated from the sample. The solid phase is washed to remove unbound materials and interfering substances such as non-specific proteins which may also be present in the sample. The solid phase containing the antibody of interest bound to the immobilized polypeptide is subsequently incubated with a second, labeled antibody or antibody bound to a coupling agent such as biotin or avidin. This second antibody can be another anti-SARS-CoV2 antibody or another antibody. Labels for antibodies are well-known in the art and include radionuclides, enzymes (e.g. maleate dehydrogenase, horseradish peroxidase, glucose oxidase, catalase), fluors (fluorescein isothiocyanate, rhodamine, phycocyanin, fluorescarmine), biotin, and the like. The labeled antibodies are incubated with the solid and the label bound to the solid phase is measured. These and other immunoassays can be easily performed by those of ordinary skill in the art.

[0376] An exemplary method for detecting the presence or absence of a SARS-CoV2 in a biological sample involves obtaining a biological sample from a test subject and contacting the biological sample with a labeled monoclonal antibody according to the invention such that the presence of the SARS-CoV2 is detected in the biological sample.

[0377] As used herein, the term “labeled”, with regard to the probe or antibody, can refer to direct labeling of the probe or antibody by coupling (i.e., physically linking) a detectable substance to the probe or antibody, as well as indirect labeling of the probe or antibody by reactivity with another reagent that is directly labeled. Examples of indirect labeling include detection of a primary antibody using a fluorescently-labeled secondary antibody and end-labeling of a DNA probe with biotin such that it can be detected with fluorescently-labeled streptavidin. The term “biological sample” can refer to tissues, cells and biological fluids isolated from a subject, as well as tissues, cells and fluids present within a subject. That is, the detection method of the invention can be used to detect a SARS-CoV2 in a biological sample in vitro as well as in vivo. For example, in vitro techniques for detection of a SARS-CoV2 include enzyme linked immunosorbent assays (ELISAs), Western blots, immunoprecipitations, and immunofluorescence. Furthermore, in vivo techniques for detection of a SARS-CoV2 include introducing into a subject a labeled anti-SARS-CoV2 antibody. For example, the antibody can be labeled with a radioactive marker whose presence and location in a subject can be detected by standard imaging techniques.

[0378] In one embodiment, the biological sample contains protein molecules from the test subject. For example, one biological sample is a peripheral blood leukocyte sample isolated by conventional means from a subject.

[0379] The invention also encompasses kits for detecting the presence of a SARS-CoV2 in a biological sample. For example, the kit can comprise: a labeled compound or agent capable of detecting a SARS-CoV2 (e.g., an anti-SARS-CoV2 monoclonal antibody) in a biological sample; means for determining the amount of a SARS-CoV2 in the sample; and means for comparing the amount of a SARS-CoV2 in the sample with a standard. The compound or agent can be packaged in a suitable container. The kit can further comprise instructions for using the kit to detect a SARS-CoV2 in a sample.

[0380] Passive Immunization

[0381] Passive immunization has proven to be an effective and safe strategy for the prevention and treatment of viral diseases. (See Keller et al., Clin. Microbiol. Rev. 13:602-14 (2000); Casadevall, Nat. Biotechnol. 20:114 (2002); Shibata et al., Nat. Med. 5:204-10 (1999); and Igarashi et al., Nat. Med. 5:211-16 (1999), each of which are incorporated herein by reference)). Passive immunization using neutralizing human monoclonal antibodies could provide an immediate treatment strategy for emergency prophylaxis and treatment of SARS-CoV2 infection and related diseases and disorders while the alternative and more time-consuming development of vaccines and new drugs in underway.

[0382] Subunit vaccines potentially offer significant advantages over conventional immunogens. They avoid the safety hazards inherent in production, distribution, and delivery of conventional killed or attenuated whole-pathogen vaccines. Furthermore, they can be rationally designed to include only confirmed protective epitopes, thereby avoiding suppressive T epitopes (see Steward et al., J. Virol. 69:7668 (1995)) or immunodominant B epitopes that subvert the immune system by inducing futile, non-protective responses (e.g. “decoy” epitopes). (See Garrity et al., J. Immunol. 159:279 (1997)).

[0383] Moreover, those skilled in the art will recognize that good correlation exists between the antibody neutralizing activity in vitro and the protection in vivo for many different viruses, challenge routes, and animal models. (See Burton, Natl. Rev. Immunol. 2:706-13 (2002); Parren et al., Adv. Immunol. 77:195-262 (2001)).

[0384] Antigen-Ig Chimeras in Vaccination

[0385] It has been over a decade since the first antibodies were used as scaffolds for the efficient presentation of antigenic determinants to the immune systems. (See Zanetti, Nature 355:476-77 (1992); Zaghouani et al., Proc. Natl. Acad. Sci. USA 92:631-35 (1995)). When a peptide is included as an integral part of an IgG molecule (e.g., the 11A or 256 IgG1 monoclonal antibody described herein), the antigenicity and immunogenicity of the peptide epitopes are greatly enhanced as compared to the free peptide. Such enhancement is possibly due to the antigen-IgG chimeras longer half-life, better presentation and constrained conformation, which mimic their native structures.

[0386] Moreover, an added advantage of using an antigen-Ig chimera is that either the variable or the Fc region of the antigen-Ig chimera can be used for targeting professional antigen-presenting cells (APCs). To date, recombinant Igs have been generated in which the complementarity-determining regions (CDRs) of the heavy chain variable gene (V_{H}) are replaced with various antigenic peptides recognized by B or T cells. Such antigen-Ig chimeras have been used to induce both humoral and cellular immune responses. (See Bona et al., Immunol. Today 19:126-33 (1998)).

[0387] Chimeras with specific epitopes engrafted into the CDR3 loop have been used to induce humoral responses to either HIV-1 gp120 V3-loop or the first extracellular domain (D1) of human CD4 receptor. (See Lanza et al., Proc. Natl. Acad. Sci. USA 90:11683-87 (1993); Zaghouani et al., Proc. Natl. Acad. Sci. USA 92:631-35 (1995)). The immune sera were able to prevent infection of CD4 SupTI cells by HIV-1MN (anti-gp120 V3C) or inhibit syncytia formation (anti-CD4-D1). The CDR2 and CDR3 can be replaced with peptide epitopes simultaneously, and the length of peptide inserted can be up to 19 amino acids long.

[0388] Alternatively, one group has developed a “troybody” strategy in which peptide antigens are presented in the loops of the Ig constant (C) region and the variable region of the chimera can be used to target IgD on the surface of B-cells or MHC class II molecules on professional APCs including B-cells, dendritic cells (DC) and macrophages. (See Lunde et al., Biochem. Soc. Trans. 30:500-6 (2002)).

[0389] An antigen-Ig chimera can also be made by directly fusing the antigen with the Fc portion of an IgG molecule. You et al., Cancer Res. 61:3704-11 (2001) were able to obtain all arms of specific immune response, including very high levels of antibodies to hepatitis B virus core antigen using this method.

[0390] DNA Vaccination

[0391] DNA vaccines are stable, can provide the antigen an opportunity to be naturally processed, and can induce a longer-lasting response. Although a very attractive immunization strategy, DNA vaccines often have very limited potency to induce immune responses. Poor uptake of injected DNA by professional APCs, such as dendritic cells (DCs), may be the main cause of such limitation. Combined with the antigen-Ig chimera vaccines, a promising new DNA vaccine strategy based on the enhancement of APC antigen presentation has been reported (see Casares, et al., Viral Immunol. 10:129-36 (1997); Gerloni et al., Nat. Biotech. 15:876-81 (1997); Gerloni et al., DNA Cell Biol. 16:611-25 (1997); You et al., Cancer Res. 61:3704-11 (2001)), which takes advantage of the presence of Fc receptors (FcγRs) on the surface of DCs.

[0392] An embodiment comprises a DNA vaccine encoding an antigen (Ag)-Ig chimera. Upon immunization, Ag-Ig fusion proteins will be expressed and secreted by the cells taking up the DNA molecules. The secreted Ag-Ig fusion proteins, while inducing B-cell responses, can be captured and internalized by interaction of the Fc fragment with FcγRs on DC surface, which will promote efficient antigen presentation and greatly enhance antigen-specific immune responses. Applying the same principle, DNA encoding antigen-Ig chimeras carrying a functional anti-MHC II specific scFv region gene can also target the immunogens to all three types of APCs. The immune responses could be further boosted with use of the same protein antigens generated in vitro (i.e., “prime and boost”), if necessary. Using this strategy, specific cellular and humoral immune responses against infection of SARS-CoV2 were accomplished through intramuscular (i.m.) injection of a DNA vaccine. (See Casares et al., Viral. Immunol. 10:129-36 (1997)).

[0393] Vaccine Compositions

[0394] Therapeutic or prophylactic compositions are provided herein, which generally comprise mixtures of one or more monoclonal antibodies or ScFvs and combinations thereof. The prophylactic vaccines can be used to prevent a SARS-CoV2 infection and the therapeutic vaccines can be used to treat individuals following a SARS-CoV2 infection. Prophylactic uses include the provision of increased antibody titer to a SARS-CoV2 in a vaccination subject. In this manner, subjects at high risk of contracting SARS-CoV2 can be provided with passive immunity to a SARS-CoV2.

[0395] These vaccine compositions can be administered in conjunction with ancillary immunoregulatory agents. For example, cytokines, lymphokines, and chemokines, including, but not limited to, IL-2, modified IL-2 (Cys125→Ser125), GM-CSF, IL-12, γ-interferon, IP-10, MIP1β, and RANTES.

[0396] Methods of Immunization

[0397] The vaccines of the present invention have superior immunoprotective and immunotherapeutic properties over other anti-viral vaccines.

[0398] The invention provides a method of immunization, e.g., inducing an immune response, of a subject. A subject is immunized by administration to the subject a composition containing a membrane fusion protein of a pathogenic spike protein. The fusion protein is coated or embedded in a biologically compatible matrix.

[0399] The fusion protein is glycosylated, e.g. contains a carbohydrate moiety. The carbohydrate moiety may be in the form of a monosaccharide, disaccharide(s). oligosaccharide(s), polysaccharide(s), or their derivatives (e.g. sulfo- or phospho-substituted). The carbohydrate is linear or branched. The carbohydrate moiety is N-linked or O-linked to a polypeptide. N-linked glycosylation is to the amide nitrogen of asparagine side chains and O-linked glycosylation is to the hydroxy oxygen of serine and threonine side chains.

[0400] The carbohydrate moiety is endogenous to the subject being vaccinated. Alternatively, the carbohydrate moiety is exogenous to the subject being vaccinated. The carbohydrate moiety is a carbohydrate moieties that are not typically expressed on polypeptides of the subject being vaccinated. For example, the carbohydrate moieties are plant-specific carbohydrates. Plant specific carbohydrate moieties include for example N-linked glycan having a core bound α1,3 fucose or a core bound β1,2 xylose. Alternatively, the carbohydrate moiety are carbohydrate moieties that are expressed on polypeptides or lipids of the subject being vaccinate. For example, many host cells have been genetically engineered to produce human proteins with human-like sugar attachments.

[0401] The subject is at risk of developing or suffering from a viral infection. For example, the subject has traveled to regions or countries in which other SARS-CoV2 infections have been reported.

[0402] The methods described herein lead to a reduction in the severity or the alleviation of one or more symptoms of a viral infection. Infections are diagnosed and or monitored, typically by a physician using standard methodologies. A subject requiring immunization is identified by methods know in the art. For example, subjects are immunized as outlined in the CDC's General Recommendation on Immunization (51(RR02) pp 1-36).

[0403] The subject is e.g., any mammal, e.g., a human, a primate, mouse, rat, dog, cat, camel, cow, horse, pig, a fish or a bird.

[0404] The treatment is administered prior to diagnosis of the infection. Alternatively, treatment is administered after diagnosis. Efficaciousness of treatment is determined in association with any known method for diagnosing or treating the disorder or infection. Alleviation of one or more symptoms of the disorder indicates that the compound confers a clinical benefit.

[0405] Methods of Treatment

[0406] As used herein, the terms “treat” or “treatment” refer to both therapeutic treatment and prophylactic or preventative measures, wherein the object is to prevent or slow down (lessen) an undesired physiological change or disorder, such as the progression of COVID. Beneficial or desired clinical results include, but are not limited to, alleviation of symptoms, diminishment of extent of disease, stabilized (i.e., not worsening) state of disease, delay or slowing of disease progression, amelioration or palliation of the disease state, and remission (whether partial or total), whether detectable or undetectable. “Treatment” can refer to prolonging survival as compared to expected survival if not receiving treatment. Those in need of treatment include those already with the condition or disorder as well as those prone to have the condition or disorder or those in which the condition or disorder is to be prevented. The invention provides for both prophylactic and therapeutic methods of treating a subject at risk of (or susceptible to) a SARS-CoV2-related disease or disorder.

[0407] Prophylactic Methods

[0408] In one aspect, the invention provides methods for preventing a SARS-CoV2-related disease or disorder in a subject by administering to the subject a monoclonal antibody of the invention or an agent identified according to the methods of the invention. For example, monoclonal antibodies of the invention, and any variants thereof, can be administered in therapeutically effective amounts. Optionally, two or more anti-SARS-CoV2 antibodies are co-administered. For example, the invention provides for both prophylactic and therapeutic methods of treating a subject at risk of (or susceptible to) COVID.

[0409] Subjects at risk for a SARS-CoV2-related diseases or disorders include patients who have been exposed to the SARS-CoV2. For example, the subjects have traveled to regions or countries of the world in which other SARS-CoV2 infections have been reported and confirmed. Administration of a prophylactic agent can occur prior to the manifestation of symptoms characteristic of the SARS-CoV2-related disease or disorder, such that a disease or disorder is prevented or, alternatively, delayed in its progression.

[0410] The appropriate agent can be determined based on screening assays described herein. Alternatively, or in addition, the agent to be administered is a monoclonal antibody that neutralizes a SARS-CoV2 that has been identified according to the methods of the invention. In some embodiments, the antibody of the present invention can be administered with other antibodies or antibody fragments known to neutralize SARS-CoV2. Administration of said antibodies can be sequential, concurrent, or alternating.

[0411] Therapeutic Methods

[0412] Another aspect of the invention pertains to methods of treating a SARS-CoV2-related disease or disorder in a patient. In one embodiment, the method involves administering an agent (e.g., an agent identified by a screening assay described herein and/or monoclonal antibody identified according to the methods of the invention), or combination of agents that neutralize the SARS-CoV2 to a patient suffering from the disease or disorder.

[0413] Combinatory Methods

[0414] The invention provides treating a SARS-CoV2-related disease or disorder, in a patient by administering two or more antibodies wherein the Fc region of said variant does not bind or has reduced binding to the Fc gamma receptor, with other SARS-CoV2 neutralizing antibodies known in the art. In another embodiment, the invention provides methods for treating a SARS-CoV2-related disease or disorder in a patient by administering an antibody of the present invention with any anti-viral agent known in the art. Anti-viral agents can be peptides, nucleic acids, small molecules, inhibitors, or RNAi.

[0415] The invention will be further described in the following examples, which do not limit the scope of the invention described in the claims.

### EXAMPLES

### Example 1

[0416] Purified Phage Binding Curves (RBD-Fc)

[0417] Based on the binding curves of FIG. 3-5, we have antibodies against the RBD with a variety of affinities. There are also 3 clones which do not bind to the RBD. Looking at the sequencing, there were multiple copies of each of these clones, but they only came from S1 panning plates. This indicates that they are S1 specific but not directed to the RBD So binding curves for those 3 were generated against S1 proteins.

### Example 2

[0418] Anti-RBD Competition with ACE2

[0419] See, for example, FIG. 7-9.

[0420] Plates are coated with RBD-Fc at 0.5 ug/ml.

[0421] Plate 1: a low concentration of purified phage (on upper shoulder of binding curve) is first added to the plate, before a high concentration of ACE2 (1 μg/ml) is added

[0422] Plate 2: a low concentration of ACE2 (0.5 μg/ml) is first added to the plate, before a high concentration of purified phage is added

[0423] Samples were run in quadruplicate so that both phage binding (anti-M13) and ACE2 binding (anti-his) could be detected in duplicate

[0424] Based on the data shown in FIG. 7-9, for example, three clones were chosen for purified phage competition curves with ACE2.

[0425] Plates were coated with 0.5 μg/ml RBD-Fc. A constant amount of phage was added to each well (top shoulder of binding curve) followed by serial dilutions of ACE2. The remaining phage were then detected by anti-M13.

[0426] Referring to FIG. 10, for example, plate coated with RBD-Fc (0.5 μg/ml, 100 μl)

[0427] Step 1: phage added at 5E11 particles/ml, except RBD-E1-B3 was at 1E12 to move to shoulder of binding curve

[0428] Step 2: ACE2-his was added in 2×serial dilutions starting at 2 μg/ml

[0429] Step 3: phage binding was detected by anti M13-HRP; (ACE2 curve is detected via anti-his-hrp, no phage added)

[0430] S1-RBD-T1-B12 was used as a negative control as it was not expected to block RBD-ACE2 binding. As expected, the anti-M13 signal is flat here, showing that ACE2 did not have any effect on phage binding.

[0431] E1-B3 and T1-F7 show distinct decreases in phage binding at higher concentrations of ACE2 indicating that there is competition for the binding site. T1-F4 shows a small decrease in signal at higher concentrations but is not as clear.

### Example 3—Kinetic Analysis of Selected scFv-Fc Candidates

[0432] FIG. 53 shows result from SARS-2 S1/RBD panning. Three rounds of panning for anti-SARS-2 S1/RBD antibodies was done using recombinantly expressed soluble protein. a large number of antibodies with varying kinetic properties. The concentration of the coating protein was decreased with each round to increase the affinity of the antibodies. Two campaigns were straight panning with all three rounds against the same target protein (with different purification tags). The third campaign started with two rounds against S1, followed by a 3rd panning against the RBD protein to enrich for antibodies against the RBD. Screening was performed by picking 1344 colonies and culturing them in 2×YT media. The phage supernatants were then tested via ELISA against RBD-Fc protein (the S1 panning was also screened against S1). From our screens, >90% of the selected colonies were positive for binding to either S1 or RBD. Sequencing of all positive samples yielded 73 unique clones. Kinetic analysis was performed via BLI. Octet sensors were coated with low density of biotinylated S1 protein to minimize scFv-Fc cross walking. Antibodies with low levels of binding here were found to bind biotinylated RBD coated sensors significantly better. Without wishing to be bound by theory, this could be due to the size difference of S1 versus RBD, the RBD coated sensors have a larger number of RBD molecules available for binding. Additionally, the large size of the S1 protein forces the binding even further from the sensor surface which also contributes to lower signal.

[0433] Pseudovirus neutralization was performed with SARS-2 spike pseudovirus and 293T-ACE2 transduced cells. Kinetic data for both of these abs reveal tight binding antibodies with minimal disassociation. Additionally, epitope mapping reveals that they have similar but slightly different competition patterns (FIG. 54). Ab 12 successfully competes with Abs 14, 15, 19, 26, and 27. While Ab 27 also competes with Abs 12, 14, and 15, it does not compete with Ab 19 or Ab 26. Without wishing to be bound by theory, the antibodies bind similar epitopes but have a different angle of approach.

### Example 4—Neutralization Studies

[0434] Pseudovirus neutralization was performed with SARS-2 spike pseudovirus and 293T-ACE2 transduced cells. As shown in FIG. 55, a number of neutralizing antibodies were identified with Ab 12 and Ab 27 being the most potent.

[0435] Kinetic data for both of these abs reveal tight binding antibodies with minimal disassociation. Additionally, epitope mapping reveals that they have similar but slightly different competition patterns. Ab 12 successfully competes with Abs 14, 15, 19, 26, and 27. While Ab 27 also competes with Abs 12, 14, and 15, it does not compete with Ab 19 or Ab 26. This indicates that they bind similar epitopes but might have a different angle of approach.

### Example 5—Live Virus Neutralization

[0436] Monoclonal antibodies were diluted to 100 ug/ml by adding 50 μl of 1 mg/ml antibody to 450 μl Dulbecco's Phosphate Buffered Saline (DPBS)(Gibco™). A series of 10 half-log dilutions was then prepared in triplicate for each antibody in DPBS. Each dilution was incubated at 37° C. and 5% C02 for 1 hour with 1000 plaque forming units/ml (PFU/ml) of SARS-CoV-2 (isolate USA-WA1/2020), diluted in Dulbecco's Modified Eagle Medium (DMEM) (Gibco™) containing 2% fetal bovine serum (Gibco™) and antibiotic-antimycotic (Gibco™). Controls included DMEM containing 2% fetal bovine serum and antibiotic-antimycotic only as a negative control, 1000 PFU/ml SARS-CoV-2 incubated with DPBS, and 1000 PFU/ml SARS-CoV-2 incubated with DMEM. Two hundred microliters of each dilution or control were added to confluent monolayers of NR-596 Vero E6 cells in triplicate and incubated for 1 hour at 37° C. and 5% C02. The plates were gently rocked every 5-10 minutes to prevent monolayer drying. The monolayers were then overlaid with a 1:1 mixture of 2.5% Avicel® RC-591 microcrystalline cellulose and carboxymethylcellulose sodium (DuPont Nutrition & Biosciences, Wilmington, DE) and 2×Modified Eagle Medium (Temin's modification, Gibco™) supplemented with 2×antibiotic-antimycotic (Gibco™), 2×GlutaMAX (Gibco™) and 10% fetal bovine serum (Gibco™). Plates were incubated at 37° C. and 5% CO² for 2 days. The monolayers were fixed with 10% neutral buffered formalin and stained with 0.2% aqueous Gentian Violet (RICCA Chemicals, Arlington, TX) in 10% neutral buffered formalin for 30 min, followed by rinsing and plaque counting. The half maximal inhibitory concentrations (IC50) were calculated using GraphPad Prism 8.

TABLE I
IC₅₀ values for monoclonal antibody neutralization
activity against SARS-CoV-2.

| | | | 95% Confidence |
|---|---|---|---|
| Antibody | Series | IC₅₀ (μg/ml) | Interval |
| Ab-12 | 1 | 0.09022 | 0.07418-0.1096 |
| | 2 | 0.1035 | 0.07667-0.1387 |
| | 3 | 0.08541 | 0.07014-0.1034 |
| Ab-14 | 1 | 0.1443 | 0.08394-0.2362 |
| | 2 | 0.2298 | 0.1977-0.2673 |
| | 3 | 0.2055 | 0.1467-0.2841 |
| Ab-19 | 1 | NA | NA |
| | 2 | NA | NA |
| | 3 | 0.9627 | 0.5487-4.851 |
| Ab-27 | 1 | 0.04904 | 0.03376-0.07059 |
| | 2 | 0.04447 | 0.03555-0.05574 |
| | 3 | 0.04227 | 0.03366-0.05350 |
| Ab-28 | 1 | NA | NA |
| | 2 | NA | NA |
| | 3 | NA | NA |

### Example 6—Pseudovirus Neutralization

[0437] Pseudovirus was made my transfecting LentiX cells with CMV-d8.2, HIV-luc, and pcDNA3.4-SARS2-spike-gp41 tail with lipofectamine 3000. The cells were incubated at 37° C. for 3 days before harvest and filtration (0.45 μm). Pseudovirus is either stored at 4° C. or used immediately.

[0438] Target cells: 293T-ACE2 transduced cells, seeded 10,000 cells/well in 100 μl day before.

[0439] For neutralization assay, 120 μl pseudovirus was incubated with 120 μl ab dilution at RT for 1 hour. Growth media was removed from the plate and replaced with 60 μl pseudovirus/Ab mixture (done in triplicate). The plates were incubated at 37° C. for 48 hours before the cells were lysed with Promega passive lysis buffer followed by luciferase measurement via Promega Bio-Glow.

[0440] Plate 2: single dilution at 100 μg/ml scFv-Fc for all 28 antibodies

[0441] Plate 4: titration curves of scFv-Fcs from set 1 (Ab 7, Ab 12, Ab2-2, Ab 2-7, Ab2-10)

[0442] Plate 6: titration curves of scFv-Fcs from set 2 (Ab 14, Ab 19, Ab 23, Ab 26, Ab 27, Ab 28)
[0443] *antibodies from second set were chosen based on competition assay, best binder was chosen for each bin

### Example 7—Thermal Shift Assay

[0444] Thermal shift assays (or differential scanning calorimetry/DSC) is used to measure the unfolding of a protein in real time via hydrophobic interactions. Protein is incubated in the presence of a fluorescent dye (SYPRO Orange) and in the folded state, there is low binding of the dye to the protein. As the temperature of the sample increases, the protein will unfold, gradually exposing the hydrophobic core of the protein to the SYPRO Orange in solution increasing the fluorescent signal. SYPRO orange fluorescence is quenched by H2O, hence there is lower fluorescence with a folded protein. (See Huynh, Kathy, and Carrie L Partch. “Analysis of protein stability and ligand interactions by thermal shift assay.” Current protocols in protein science vol. 79 28.9.1-28.9.14. 2 Feb. 2015, doi:10.1002/0471140864.ps2809s79; King, Amy C et al. “High-throughput measurement, correlation analysis, and machine-learning predictions for pH and thermal stabilities of Pfizer-generated antibodies.” Protein science: a publication of the Protein Society vol. 20, 9 (2011): 1546-57. doi:10.1002/pro.680).

### Example 8—Live Virus Neutralization Data

[0445] Monoclonal antibodies were diluted to 100 ug/ml by adding 50 μl of 1 mg/ml antibody to 450 μl Dulbecco's Phosphate Buffered Saline (DPBS)(Gibco™). A series of 10 half-log dilutions was then prepared in triplicate for each antibody in DPBS. Each dilution was incubated at 37° C. and 5% C02 for 1 hour with 1000 plaque forming units/ml (PFU/ml) of SARS-CoV-2 (isolate USA-WA1/2020), diluted in Dulbecco's Modified Eagle Medium (DMEM) (Gibco™) containing 2% fetal bovine serum (Gibco™) and antibiotic-antimycotic (Gibco™). Controls included DMEM containing 2% fetal bovine serum and antibiotic-antimycotic only as a negative control, 1000 PFU/ml SARS-CoV-2 incubated with DPBS, and 1000 PFU/ml SARS-CoV-2 incubated with DMEM. Two hundred microliters of each dilution or control were added to confluent monolayers of NR-596 Vero E6 cells in triplicate and incubated for 1 hour at 37° C. and 5% C02. The plates were gently rocked every 5-10 minutes to prevent monolayer drying. The monolayers were then overlaid with a 1:1 mixture of 2.5% Avicel® RC-591 microcrystalline cellulose and carboxymethylcellulose sodium (DuPont Nutrition & Biosciences, Wilmington, DE) and 2×Modified Eagle Medium (Temin's modification, Gibco™) supplemented with 2×antibiotic-antimycotic (Gibco™), 2×GlutaMAX (Gibco™) and 10% fetal bovine serum (Gibco™). Plates were incubated at 37° C. and 5% CO² for 2 days. The monolayers were fixed with 10% neutral buffered formalin and stained with 0.2% aqueous Gentian Violet (RICCA Chemicals, Arlington, TX) in 10% neutral buffered formalin for 30 min, followed by rinsing and plaque counting. The half maximal inhibitory concentrations (IC50) were calculated using GraphPad Prism 8.

### Example 9—Lung Lesion Analyses

[0446] Tissues originated from Syrian golden hamsters infected with SARS-CoV-2 and either treated with monoclonal antibodies or left untreated. Photographs of whole plucks (lungs and heart) taken at necropsy were provided. One H&E stained slide was presented for each animal. All tissues examined were fixed in formalin for at least 96 hours prior to preparation. Embedding, slide preparation and staining were conducted per standard protocol. Only lung tissue was presented for examination. Lung consolidation percentages were determined as a function of the total observed area affected by consolidation, defined as collapsed alveoli, infiltration of mononuclear inflammatory cells, and darkened (plum colored) staining. Infiltrated foci are regions with significant numbers of infiltrating inflammatory mononuclear cells. These are often readily identifiable as blue/purple patches in the tissue section. Infiltrated airways were defined as large or small airways fully or partly (>10%) occluded by mononuclear inflammatory cells.

[0447] Gross and clinical pathology findings: Patchy consolidation was observed on all lungs, with some apparent improvement in treated animals. However, it was difficult to assess the degree of consolidation, as it was difficult to differentiate consolidation from blood on the surface of the organ in the photographs provided.

[0448] Lung lesion score:
[0449] 0: no lesions observed
[0450] 1: 25% and under area of lesion coverage
[0451] 2: 26%-49% area of lesion coverage
[0452] 3: 50%-74% area of lesion coverage
[0453] 4: 75% and above area of lesion coverage

TABLE II
Lung Lesion Scoring Table

| | Gross lung lesion | |
|---|---|---|
| ID# | score | Full Lung lobe appearance |
| Control 1 | 2 | Yes, rounded edges of lobes |
| Control 2 | 1 | Yes, rounded edges of lobes |
| Control 3 | 1 | Yes, rounded edges of lobes |
| Control 4 | 0 | Yes, rounded edges of lobes |
| Control 5 | 2 | Yes, rounded edges of lobes |
| A12 | 2 | No rounding of lobe edges |
| A12 | 1 | No rounding of lobe edges |
| A12 | 1 | No rounding of lobe edges |
| A12 | 2 | No rounding of lobe edges |
| A12 | 1 | No rounding of lobe edges |

[0454] Virus-Only:

[0455] General. Changes observed are consistent with viral interstitial pneumonia, namely alveolar wall thickening, alveolar collapse, and inflammatory cell infiltration. Airway obstruction by inflammatory cells common, and present in all sections.

| | % Infiltrated | No. of Infiltration | | |
|---|---|---|---|---|
| Animal | Airways | Foci | Consolidation | Comments |
| 1 | 45% | 8 | 13% | None. |
| 2 | 60% | 7 | 29% | None. |
| 3 | 25% | 3 | 56% | None. |
| 4 | 40% | 4 | 50% | None. |
| 5 | 55% | 5 | 20% | None. |

[0456] Tissues from untreated animals displayed gross pathology and histopathology consistent with viral interstitial pneumonia. Inflammatory cell infiltration present in all sections, along with infiltration of large and small airways and perivascular cuffing. Severity of pathology was variable between animals.

[0457] Lung tissues from animals that received monoclonal antibodies displayed effectively identical pathology, though certain sections had notable infiltration of inflammatory cells into large airways. Pathology was moderately variable between animals.

[0458] Consolidation and airway infiltration were significantly improved in animals treated with AB12 (p<0.05, Mann-Whitney test). No improvement was found in the number of observed foci of inflammatory infiltration.

[0459] Antibody 12:

[0460] General. Signs of typical histopathology associated with viral interstitial pneumonia (discussed previously) noted in all sections. Significantly improved consolidation relative to untreated animals. Some sections had notable infiltration of inflammatory cells into large airways.

| | % Infiltrated | No. of Infiltration | | |
|---|---|---|---|---|
| Animal | Airways | Foci | Consolidation | Comments |
| 1 | 10% | 1 | 0% | None. |
| 2 | 10% | 3 | 9% | None. |
| 3 | 30% | 4 | 8% | ** |
| 4 | 20% | 4 | 14% | None. |
| 5 | 40% | 5 | 3% | None. |

** Large airways with significant inflammatory cell infiltration noted

### Example 10—Syrian Golden Hamster Experiments

[0461] Syrian hamster SARS CoV virus challenge study. Animal challenge studies were conducted. 1 day before the challenge hamsters were microchipped. On day 0, hamsters were anesthetized with ketamine/xylazine and challenged with SARS-CoV-2 by the intranasal (IN) route with up to 10\hat{ }7 TCID50 (or 10\hat{ }6 PFU/ml) in a total volume up to 100 μL. The viral strain used is Wuhan Hu-1 strain, SARS-CoV strain 2019-nCoV/USA_WA1/2020 (WA1); GenBank: MN985325; GISAID: EPI_ISL_404895. For animal experiments passage 5 was used. The final challenge dose was 10000 plaque forming units diluted in sterile PBS. Body weight and body temperature were measured each day, starting at day 0. On day 1 post challenge (dpc) hamsters were treated with 5 mg/kg of monoclonal antibodies diluted in 0.5 ml of sterile PBS via intraperitoneal route (IP). The control group received an equal volume of sterile PBS via the same IP route. On day 3 post challenge all animals were sacrificed. At necropsy, terminal blood was collected into a labeled 3.5 mL SST vacutainer from all animals. Lungs were harvested for all groups.

[0462] Syrian golden hamster tissue processing and viral load determination. For the pathogenicity study, animals from each study group were euthanized on day 3 post challenge, and the lungs were harvested. Right lungs were placed in L15 medium supplemented with 10% fetal bovine serum (Gibco) and Antibiotic-Antimycotic solution (Gibco), flash-frozen in dry ice and stored at −80C until processing. Tissues were thawed and homogenized using the TissueLyser II system (Qiagen). Tissue homogenates were titrated on Vero E6 cell monolayers in 96-well plates to determine viral loads. 10× fold dilutions of the lung supematants were incubated for 1 hour and replaced with 100 μLs of 0.9% methylcellulose in minimal essential medium (MEM) containing 10% fetal bovine serum (Quality Biologicals) and 0.1% gentamicin sulfate (Mediatech), followed by incubation at 37 C. Plates were fixed with 10% buffered formalin (Thermo Fisher) with subsequent removal from the biocontainment laboratories. Foci were visualized by staining monolayers with a mixture of 37 SARS-CoV-2 specific human antibodies kindly provided by Distributed Bio. As the secondary antibody, HRP-labeled goat anti-human IgG (SeraCare) was used at dilution 1:500. Primary and secondary antibodies were diluted in 1×DPBS with 5% milk. Plaques were revealed by AEC substrate (enQuire Bioreagents).

[0463] Syrian golden hamster histopathology. During necropsy, gross lesions were noted and representative lung tissues from the left lobe were collected in 10% formalin. After a 24-hour initial fixation at 4C, the lung tissues were transferred to fresh 10% formalin for an additional 48-hour fixation, prior to removal from containment. Formalin-fixed tissues were processed by standard histological procedures by the UTMB Anatomic Pathology Core. About 4 μm-thick sections were cut and stained with hematoxylin and eosin (HE). Sections of lungs were examined for the extent of inflammation, type of inflammatory foci, and changes in alveoli/alveolar septa/airways/blood vessels in parallel with sections from uninfected or control animals. The blinded tissue sections were semi-quantitatively scored for pathological lesions using the criteria described in Table S1 (51). All slides were scored by a trained staff member. Significance was assessed using a Kruskall-Wallis test with Dunn's post-hoc correction.

TABLE III
Lung Lesion Scores

| | Gross lung lesion | |
|---|---|---|
| ID# | score | Full Lung lobe appearance |
| Control 1 | 2 | Yes, rounded edges of lobes |
| Control 2 | 1 | Yes, rounded edges of lobes |
| Control 3 | 1 | Yes, rounded edges of lobes |
| Control 4 | 0 | Yes, rounded edges of lobes |
| Control 5 | 2 | Yes, rounded edges of lobes |
| A12 | 2 | No rounding of lobe edges |
| A12 | 1 | No rounding of lobe edges |
| A12 | 1 | No rounding of lobe edges |
| A12 | 2 | No rounding of lobe edges |
| A12 | 1 | No rounding of lobe edges |

[0464] 0: no lesions observed; 1: 25% and under area of lesion coverage; 2: 26%-49% area of lesion coverage; 3: 50%-74% area of lesion coverage; 4: 75% and above area of lesion coverage.

### Example 11—Spike Mutant Binding Studies

[0465] The table below shows examples of spike mutant binding to the SARS-CoV-2 antibodies described herein.

| | | Loading | | Loading | | | | |
|---|---|---|---|---|---|---|---|---|
| Sample | Dissoc. | Well | Loading | Conc. | | Conc. | | KD |
| ID | Loc. | Location | Sample ID | (μg/ml) | Cycle | (nM) | Response | (M) |
| WT Spike | p1A12 | A1 | Ab 2 scFv-Fc | 1 | 1 | 48.3 | 0.0652 | 1.99E−10 |
| WT Spike | p1A12 | A2 | Ab 5 scFv-Fc | 1 | 2 | 48.3 | 0.0828 | 6.31E−12 |
| WT Spike | p1A12 | A3 | Ab 7 scFv-Fc | 1 | 3 | 48.3 | 0.2424 | 7.00E−12 |
| WT Spike | p1A12 | A4 | Ab 8 scFv-Fc | 1 | 4 | 48.3 | 0.118 | 7.15E−12 |
| D614G | p1B12 | B1 | Ab 2 scFv-Fc | 1 | 1 | 48.3 | 0.1499 | 1.67E−10 |
| Spike | | | | | | | | |
| D614G | p1B12 | B2 | Ab 5 scFv-Fc | 1 | 2 | 48.3 | 0.1913 | 3.14E−12 |
| Spike | | | | | | | | |
| D614G | p1B12 | B3 | Ab 7 scFv-Fc | 1 | 3 | 48.3 | 0.345 | 2.74E−12 |
| Spike | | | | | | | | |
| D614G | p1B12 | B4 | Ab 8 scFv-Fc | 1 | 4 | 48.3 | 0.1871 | 7.30E−12 |
| Spike | | | | | | | | |
| B.1.1.7 | p1C12 | C1 | Ab 2 scFv-Fc | 1 | 1 | 48.4 | 0.1608 | 6.57E−10 |
| Spike | | | | | | | | |
| B.1.1.7 | p1C12 | C2 | Ab 5 scFv-Fc | 1 | 2 | 48.4 | 0.185 | 3.26E−10 |
| Spike | | | | | | | | |
| B.1.1.7 | p1C12 | C3 | Ab 7 scFv-Fc | 1 | 3 | 48.4 | 0.3565 | 1.10E−12 |
| Spike | | | | | | | | |
| B.1.1.7 | p1C12 | C4 | Ab 8 scFv-Fc | 1 | 4 | 48.4 | 0.2023 | 2.29E−12 |
| Spike | | | | | | | | |
| B.1.351 | p1D12 | D1 | Ab 2 scFv-Fc | 1 | 1 | 48.5 | 0.0439 | 5.03E−10 |
| Spike | | | | | | | | |
| B.1.351 | p1D12 | D2 | Ab 5 scFv-Fc | 1 | 2 | 48.5 | 0.1247 | 1.81E−11 |
| Spike | | | | | | | | |
| B.1.351 | p1D12 | D3 | Ab 7 scFv-Fc | 1 | 3 | 48.5 | 0.2329 | 1.67E−12 |
| Spike | | | | | | | | |
| B.1.351 | p1D12 | D4 | Ab 8 scFv-Fc | 1 | 4 | 48.5 | 0.0872 | 1.09E−09 |
| Spike | | | | | | | | |
| P.1 Spike | p1F12 | F1 | Ab 2 scFv-Fc | 1 | 1 | 48.3 | 0.0281 | 9.13E−12 |
| P.1 Spike | p1F12 | F2 | Ab 5 scFv-Fc | 1 | 2 | 48.3 | 0.1146 | 7.71E−12 |
| P.1 Spike | p1F12 | F3 | Ab 7 scFv-Fc | 1 | 3 | 48.3 | 0.242 | 1.09E−11 |
| P.1 Spike | p1F12 | F4 | Ab 8 scFv-Fc | 1 | 4 | 48.3 | 0.0784 | 1.06E−11 |
| WT Spike | p1A12 | A5 | Ab 2-2 scFv-Fc | 1 | 1 | 48.3 | 0.0747 | 9.01E−12 |
| WT Spike | p1A12 | A6 | Ab 2-7 scFv-Fc | 1 | 2 | 48.3 | 0.0672 | 7.85E−12 |
| WT Spike | p1A12 | A7 | Ab 2-10 scFv-Fc | 1 | 3 | 48.3 | 0.0423 | 5.65E−12 |
| WT Spike | p1A12 | A8 | Ab 12 scFv-Fc | 1 | 4 | 48.3 | 0.1857 | 8.31E−12 |
| WT Spike | p1A12 | A9 | Ab 13 scFv-Fc | 1 | 5 | 48.3 | 0.0732 | 8.55E−12 |
| D614G | p1B12 | B5 | Ab 2-2 scFv-Fc | 1 | 1 | 48.3 | 0.1324 | 8.91E−12 |
| Spike | | | | | | | | |
| D614G | p1B12 | B6 | Ab 2-7 scFv-Fc | 1 | 2 | 48.3 | 0.1161 | 9.93E−12 |
| Spike | | | | | | | | |
| D614G | p1B12 | B7 | Ab 2-10 scFv-Fc | 1 | 3 | 48.3 | 0.0723 | 8.87E−12 |
| Spike | | | | | | | | |
| D614G | p1B12 | B8 | Ab 12 scFv-Fc | 1 | 4 | 48.3 | 0.2182 | 1.12E−11 |
| Spike | | | | | | | | |
| D614G | p1B12 | B9 | Ab 13 scFv-Fc | 1 | 5 | 48.3 | 0.1071 | 8.10E−12 |
| Spike | | | | | | | | |
| B.1.1.7 | p1C12 | C5 | Ab 2-2 scFv-Fc | 1 | 1 | 48.4 | 0.1348 | 3.06E−12 |
| Spike | | | | | | | | |
| B.1.1.7 | p1C12 | C6 | Ab 2-7 scFv-Fc | 1 | 2 | 48.4 | 0.1272 | 3.79E−10 |
| Spike | | | | | | | | |
| B.1.1.7 | p1C12 | C7 | Ab 2-10 scFv-Fc | 1 | 3 | 48.4 | 0.0939 | 6.82E−10 |
| Spike | | | | | | | | |
| B.1.1.7 | p1C12 | C8 | Ab 12 scFv-Fc | 1 | 4 | 48.4 | 0.1773 | 2.73E−12 |
| Spike | | | | | | | | |
| B.1.1.7 | p1C12 | C9 | Ab 13 scFv-Fc | 1 | 5 | 48.4 | 0.1134 | 1.91E−12 |
| Spike | | | | | | | | |
| B.1.351 | p1D12 | D5 | Ab 2-2 scFv-Fc | 1 | 1 | 48.5 | 0.1185 | 6.53E−12 |
| Spike | | | | | | | | |
| B.1.351 | p1D12 | D6 | Ab 2-7 scFv-Fc | 1 | 2 | 48.5 | 0.1298 | 3.60E−10 |
| Spike | | | | | | | | |
| B.1.351 | p1D12 | D7 | Ab 2-10 scFv-Fc | 1 | 3 | 48.5 | 0.1032 | 5.23E−10 |
| Spike | | | | | | | | |
| B.1.351 | p1D12 | D8 | Ab 12 scFv-Fc | 1 | 4 | 48.5 | 0.0737 | 1.45E−09 |
| Spike | | | | | | | | |
| B.1.351 | p1D12 | D9 | Ab 13 scFv-Fc | 1 | 5 | 48.5 | 0.1027 | 7.35E−10 |
| Spike | | | | | | | | |
| P.1 Spike | p1F12 | F5 | Ab 2-2 scFv-Fc | 1 | 1 | 48.3 | 0.1434 | 8.94E−12 |
| P.1 Spike | p1F12 | F6 | Ab 2-7 scFv-Fc | 1 | 2 | 48.3 | 0.152 | 7.04E−12 |
| P.1 Spike | p1F12 | F7 | Ab 2-10 scFv-Fc | 1 | 3 | 48.3 | 0.0969 | 6.67E−12 |
| P.1 Spike | p1F12 | F8 | Ab 12 scFv-Fc | 1 | 4 | 48.3 | 0.0718 | 8.55E−12 |
| P.1 Spike | p1F12 | F9 | Ab 13 scFv-Fc | 1 | 5 | 48.3 | 0.1122 | 4.88E−12 |
| WT Spike | p1A12 | A1 | Ab 14 scFv-Fc | 1 | 1 | 48.3 | 0.3126 | 8.22E−12 |
| WT Spike | p1A12 | A2 | Ab 16 scFv-Fc | 1 | 2 | 48.3 | 0.346 | 1.18E−11 |
| WT Spike | p1A12 | A3 | Ab 17 scFv-Fc | 1 | 3 | 48.3 | 0.2478 | 6.35E−12 |
| WT Spike | p1A12 | A4 | Ab 18 scFv-Fc | 1 | 4 | 48.3 | 0.2165 | 9.07E−12 |
| D614G | p1B12 | B1 | Ab 14 scFv-Fc | 1 | 1 | 48.3 | 0.4015 | 8.12E−12 |
| Spike | | | | | | | | |
| D614G | p1B12 | B2 | Ab 16 scFv-Fc | 1 | 2 | 48.3 | 0.434 | 8.35E−12 |
| Spike | | | | | | | | |
| D614G | p1B12 | B3 | Ab 17 scFv-Fc | 1 | 3 | 48.3 | 0.3573 | 6.80E−12 |
| Spike | | | | | | | | |
| D614G | p1B12 | B4 | Ab 18 scFv-Fc | 1 | 4 | 48.3 | 0.2909 | 6.33E−12 |
| Spike | | | | | | | | |
| B.1.1.7 | p1C12 | C1 | Ab 14 scFv-Fc | 1 | 1 | 48.4 | 0.355 | 7.98E−12 |
| Spike | | | | | | | | |
| B.1.1.7 | p1C12 | C2 | Ab 16 scFv-Fc | 1 | 2 | 48.4 | 0.3876 | 2.36E−12 |
| Spike | | | | | | | | |
| B.1.1.7 | p1C12 | C3 | Ab 17 scFv-Fc | 1 | 3 | 48.4 | 0.3312 | 1.85E−12 |
| Spike | | | | | | | | |
| B.1.1.7 | p1C12 | C4 | Ab 18 scFv-Fc | 1 | 4 | 48.4 | 0.2559 | 9.28E−12 |
| Spike | | | | | | | | |
| B.1.351 | p1D12 | D1 | Ab 14 scFv-Fc | 1 | 1 | 48.5 | 0.2534 | 3.10E−12 |
| Spike | | | | | | | | |
| B.1.351 | p1D12 | D2 | Ab 16 scFv-Fc | 1 | 2 | 48.5 | 0.4045 | <1.0E−12 |
| Spike | | | | | | | | |
| B.1.351 | p1D12 | D3 | Ab 17 scFv-Fc | 1 | 3 | 48.5 | 0.1994 | 5.62E−10 |
| Spike | | | | | | | | |
| B.1.351 | p1D12 | D4 | Ab 18 scFv-Fc | 1 | 4 | 48.5 | 0.1204 | 1.34E−09 |
| Spike | | | | | | | | |
| P.1 Spike | p1F12 | F1 | Ab 14 scFv-Fc | 1 | 1 | 48.3 | 0.2699 | 9.75E−12 |
| P.1 Spike | p1F12 | F2 | Ab 16 scFv-Fc | 1 | 2 | 48.3 | 0.3497 | 7.93E−12 |
| P.1 Spike | p1F12 | F3 | Ab 17 scFv-Fc | 1 | 3 | 48.3 | 0.1772 | 8.00E−12 |
| P.1 Spike | p1F12 | F4 | Ab 18 scFv-Fc | 1 | 4 | 48.3 | 0.1088 | 2.97E−12 |
| WT Spike | p1A12 | A5 | Ab 19 scFv-Fc | 1 | 1 | 48.3 | 0.1214 | 8.90E−12 |
| WT Spike | p1A12 | A6 | Ab 20 scFv-Fc | 1 | 2 | 48.3 | 0.0985 | 9.01E−12 |
| WT Spike | p1A12 | A7 | Ab 21 scFv-Fc | 1 | 3 | 48.3 | 0.1473 | 9.25E−12 |
| WT Spike | p1A12 | A8 | Ab 22 scFv-Fc | 1 | 4 | 48.3 | 0.1001 | 8.87E−12 |
| WT Spike | p1A12 | A9 | Ab 23 scFv-Fc | 1 | 5 | 48.3 | 0.0845 | 8.84E−12 |
| D614G | p1B12 | B5 | Ab 19 scFv-Fc | 1 | 1 | 48.3 | 0.2371 | 1.09E−11 |
| Spike | | | | | | | | |
| D614G | p1B12 | B6 | Ab 20 scFv-Fc | 1 | 2 | 48.3 | 0.1899 | 8.64E−12 |
| Spike | | | | | | | | |
| D614G | p1B12 | B7 | Ab 21 scFv-Fc | 1 | 3 | 48.3 | 0.2275 | 8.00E−12 |
| Spike | | | | | | | | |
| D614G | p1B12 | B8 | Ab 22 scFv-Fc | 1 | 4 | 48.3 | 0.1713 | 8.89E−12 |
| Spike | | | | | | | | |
| D614G | p1B12 | B9 | Ab 23 scFv-Fc | 1 | 5 | 48.3 | 0.1623 | 8.82E−12 |
| Spike | | | | | | | | |
| B.1.1.7 | p1C12 | C5 | Ab 19 scFv-Fc | 1 | 1 | 48.4 | 0.2032 | 1.03E−11 |
| Spike | | | | | | | | |
| B.1.1.7 | p1C12 | C6 | Ab 20 scFv-Fc | 1 | 2 | 48.4 | 0.1733 | 2.60E−12 |
| Spike | | | | | | | | |
| B.1.1.7 | p1C12 | C7 | Ab 21 scFv-Fc | 1 | 3 | 48.4 | 0.1989 | 1.47E−12 |
| Spike | | | | | | | | |
| B.1.1.7 | p1C12 | C8 | Ab 22 scFv-Fc | 1 | 4 | 48.4 | 0.1485 | 9.13E−12 |
| Spike | | | | | | | | |
| B.1.1.7 | p1C12 | C9 | Ab 23 scFv-Fc | 1 | 5 | 48.4 | 0.1348 | 9.11E−12 |
| Spike | | | | | | | | |
| B.1.351 | p1D12 | D5 | Ab 19 scFv-Fc | 1 | 1 | 48.5 | 0.2584 | 1.18E−11 |
| Spike | | | | | | | | |
| B.1.351 | p1D12 | D6 | Ab 20 scFv-Fc | 1 | 2 | 48.5 | 0.2131 | 7.03E−12 |
| Spike | | | | | | | | |
| B.1.351 | p1D12 | D7 | Ab 21 scFv-Fc | 1 | 3 | 48.5 | 0.1483 | 3.69E−10 |
| Spike | | | | | | | | |
| B.1.351 | p1D12 | D8 | Ab 22 scFv-Fc | 1 | 4 | 48.5 | 0.1833 | 3.18E−12 |
| Spike | | | | | | | | |
| B.1.351 | p1D12 | D9 | Ab 23 scFv-Fc | 1 | 5 | 48.5 | 0.1892 | 7.58E−12 |
| Spike | | | | | | | | |
| P.1 Spike | p1F12 | F5 | Ab 19 scFv-Fc | 1 | 1 | 48.3 | 0.2044 | 8.94E−12 |
| P.1 Spike | p1F12 | F6 | Ab 20 scFv-Fc | 1 | 2 | 48.3 | 0.1695 | 1.12E−11 |
| P.1 Spike | p1F12 | F7 | Ab 21 scFv-Fc | 1 | 3 | 48.3 | 0.1031 | 9.52E−12 |
| P.1 Spike | p1F12 | F8 | Ab 22 scFv-Fc | 1 | 4 | 48.3 | 0.1363 | 8.85E−12 |
| P.1 Spike | p1F12 | F9 | Ab 23 scFv-Fc | 1 | 5 | 48.3 | 0.1228 | 8.79E−12 |
| WT Spike | p1A12 | A1 | Ab 25 scFv-Fc | 1 | 1 | 48.3 | 0.0219 | 8.90E−12 |
| WT Spike | p1A12 | A2 | Ab 26 scFv-Fc | 1 | 2 | 48.3 | 0.1853 | 1.10E−11 |
| WT Spike | p1A12 | A3 | Ab 27 scFv-Fc | 1 | 3 | 48.3 | 0.2015 | 8.78E−12 |
| WT Spike | p1A12 | A4 | Ab 28 scFv-Fc | 1 | 4 | 48.3 | 0.1318 | 8.90E−12 |
| D614G | p1B12 | B1 | Ab 25 scFv-Fc | 1 | 1 | 48.3 | 0.0425 | 8.56E−12 |
| Spike | | | | | | | | |
| D614G | p1B12 | B2 | Ab 26 scFv-Fc | 1 | 2 | 48.3 | 0.3036 | 9.97E−12 |
| Spike | | | | | | | | |
| D614G | p1B12 | B3 | Ab 27 scFv-Fc | 1 | 3 | 48.3 | 0.2756 | 7.53E−12 |
| Spike | | | | | | | | |
| D614G | p1B12 | B4 | Ab 28 scFv-Fc | 1 | 4 | 48.3 | 0.1986 | 9.41E−12 |
| Spike | | | | | | | | |
| B.1.1.7 | p1C12 | C1 | Ab 25 scFv-Fc | 1 | 1 | 48.4 | 0.0668 | 4.27E−10 |
| Spike | | | | | | | | |
| B.1.1.7 | p1C12 | C2 | Ab 26 scFv-Fc | 1 | 2 | 48.4 | 0.3357 | 1.37E−12 |
| Spike | | | | | | | | |
| B.1.1.7 | p1C12 | C3 | Ab 27 scFv-Fc | 1 | 3 | 48.4 | 0.2805 | 1.57E−12 |
| Spike | | | | | | | | |
| B.1.1.7 | p1C12 | C4 | Ab 28 scFv-Fc | 1 | 4 | 48.4 | 0.2057 | 1.49E−12 |
| Spike | | | | | | | | |
| B.1.351 | p1D12 | D1 | Ab 25 scFv-Fc | 1 | 1 | 48.5 | 0.0577 | 1.13E−12 |
| Spike | | | | | | | | |
| B.1.351 | p1D12 | D2 | Ab 26 scFv-Fc | 1 | 2 | 48.5 | 0.2143 | 1.78E−12 |
| Spike | | | | | | | | |
| B.1.351 | p1D12 | D3 | Ab 27 scFv-Fc | 1 | 3 | 48.5 | 0.0974 | 1.25E−12 |
| Spike | | | | | | | | |
| B.1.351 | p1D12 | D4 | Ab 28 scFv-Fc | 1 | 4 | 48.5 | 0.1197 | 6.38E−12 |
| Spike | | | | | | | | |
| P.1 Spike | p1F12 | F1 | Ab 25 scFv-Fc | 1 | 1 | 48.3 | 0.0396 | 8.72E−12 |
| P.1 Spike | p1F12 | F2 | Ab 26 scFv-Fc | 1 | 2 | 48.3 | 0.1877 | 1.03E−11 |
| P.1 Spike | p1F12 | F3 | Ab 27 scFv-Fc | 1 | 3 | 48.3 | 0.0795 | 8.90E−12 |
| P.1 Spike | p1F12 | F4 | Ab 28 scFv-Fc | 1 | 4 | 48.3 | 0.1023 | 8.91E−12 |
| WT Spike | p1A12 | A5 | Ab 29 scFv-Fc | 1 | 1 | 48.3 | 0.126 | 1.49E−10 |
| WT Spike | p1A12 | A6 | Ab 30 scFv-Fc | 1 | 2 | 48.3 | 0.1075 | 1.02E−12 |
| WT Spike | p1A12 | A7 | Ab 31 scFv-Fc | 1 | 3 | 48.3 | 0.1009 | <1.0E−12 |
| WT Spike | p1A12 | A8 | Ab 32 scFv-Fc | 1 | 4 | 48.3 | 0.1305 | 6.32E−12 |
| WT Spike | p1A12 | A9 | Ab 34 scFv-Fc | 1 | 5 | 48.3 | 0.1002 | 6.58E−12 |
| D614G | p1B12 | B5 | Ab 29 scFv-Fc | 1 | 1 | 48.3 | 0.2015 | 1.04E−12 |
| Spike | | | | | | | | |
| D614G | p1B12 | B6 | Ab 30 scFv-Fc | 1 | 2 | 48.3 | 0.1789 | 7.43E−12 |
| Spike | | | | | | | | |
| D614G | p1B12 | B7 | Ab 31 scFv-Fc | 1 | 3 | 48.3 | 0.1679 | 9.03E−12 |
| Spike | | | | | | | | |
| D614G | p1B12 | B8 | Ab 32 scFv-Fc | 1 | 4 | 48.3 | 0.2042 | 7.26E−12 |
| Spike | | | | | | | | |
| D614G | p1B12 | B9 | Ab 34 scFv-Fc | 1 | 5 | 48.3 | 0.19 | 9.15E−12 |
| Spike | | | | | | | | |
| B.1.1.7 | p1C12 | C5 | Ab 29 scFv-Fc | 1 | 1 | 48.4 | 0.1185 | 6.93E−10 |
| Spike | | | | | | | | |
| B.1.1.7 | p1C12 | C6 | Ab 30 scFv-Fc | 1 | 2 | 48.4 | 0.1389 | <1.0E−12 |
| Spike | | | | | | | | |
| B.1.1.7 | p1C12 | C7 | Ab 31 scFv-Fc | 1 | 3 | 48.4 | 0.1345 | <1.0E−12 |
| Spike | | | | | | | | |
| B.1.1.7 | p1C12 | C8 | Ab 32 scFv-Fc | 1 | 4 | 48.4 | 0.1506 | 2.02E−12 |
| Spike | | | | | | | | |
| B.1.1.7 | p1C12 | C9 | Ab 34 scFv-Fc | 1 | 5 | 48.4 | 0.1487 | 3.71E−12 |
| Spike | | | | | | | | |
| B.1.351 | p1D12 | D5 | Ab 29 scFv-Fc | 1 | 1 | 48.5 | 0.0418 | 3.71E−10 |
| Spike | | | | | | | | |
| B.1.351 | p1D12 | D6 | Ab 30 scFv-Fc | 1 | 2 | 48.5 | 0.0883 | <1.0E−12 |
| Spike | | | | | | | | |
| B.1.351 | p1D12 | D7 | Ab 31 scFv-Fc | 1 | 3 | 48.5 | 0.09 | <1.0E−12 |
| Spike | | | | | | | | |
| B.1.351 | p1D12 | D8 | Ab 32 scFv-Fc | 1 | 4 | 48.5 | 0.1152 | 7.11E−12 |
| Spike | | | | | | | | |
| B.1.351 | p1D12 | D9 | Ab 34 scFv-Fc | 1 | 5 | 48.5 | 0.1062 | 2.69E−12 |
| Spike | | | | | | | | |
| P.1 Spike | p1F12 | F5 | Ab 29 scFv-Fc | 1 | 1 | 48.3 | 0.0232 | 8.45E−12 |
| P.1 Spike | p1F12 | F6 | Ab 30 scFv-Fc | 1 | 2 | 48.3 | 0.0766 | 9.02E−12 |
| P.1 Spike | p1F12 | F7 | Ab 31 scFv-Fc | 1 | 3 | 48.3 | 0.0789 | 8.97E−12 |
| P.1 Spike | p1F12 | F8 | Ab 32 scFv-Fc | 1 | 4 | 48.3 | 0.1032 | 8.87E−12 |
| P.1 Spike | p1F12 | F9 | Ab 34 scFv-Fc | 1 | 5 | 48.3 | 0.0973 | 8.85E−12 |
| WT Spike | p1A12 | A1 | Ab 35 scFv-Fc | 1 | 1 | 48.3 | 0.1085 | 8.90E−12 |
| WT Spike | p1A12 | A2 | Ab 36 scFv-Fc | 1 | 2 | 48.3 | 0.076 | 9.01E−12 |
| WT Spike | p1A12 | A3 | Ab 37 scFv-Fc | 1 | 3 | 48.3 | 0.0801 | 9.00E−12 |
| WT Spike | p1A12 | A4 | Ab 38 scFv-Fc | 1 | 4 | 48.3 | 0.2736 | 7.86E−12 |
| WT Spike | p1A12 | A5 | Ab 39 scFv-Fc | 1 | 5 | 48.3 | 0.3695 | 2.04E−12 |
| D614G | p1B12 | B1 | Ab 35 scFv-Fc | 1 | 1 | 48.3 | 0.2332 | 8.69E−12 |
| Spike | | | | | | | | |
| D614G | p1B12 | B2 | Ab 36 scFv-Fc | 1 | 2 | 48.3 | 0.1619 | 7.42E−12 |
| Spike | | | | | | | | |
| D614G | p1B12 | B3 | Ab 37 scFv-Fc | 1 | 3 | 48.3 | 0.1568 | 8.54E−12 |
| Spike | | | | | | | | |
| D614G | p1B12 | B4 | Ab 38 scFv-Fc | 1 | 4 | 48.3 | 0.3275 | 3.37E−12 |
| Spike | | | | | | | | |
| D614G | p1B12 | B5 | Ab 39 scFv-Fc | 1 | 5 | 48.3 | 0.4581 | <1.0E−12 |
| Spike | | | | | | | | |
| B.1.1.7 | p1C12 | C1 | Ab 35 scFv-Fc | 1 | 1 | 48.4 | 0.1902 | 7.96E−12 |
| Spike | | | | | | | | |
| B.1.1.7 | p1C12 | C2 | Ab 36 scFv-Fc | 1 | 2 | 48.4 | 0.1462 | 5.16E−12 |
| Spike | | | | | | | | |
| B.1.1.7 | p1C12 | C3 | Ab 37 scFv-Fc | 1 | 3 | 48.4 | 0.1477 | 1.28E−12 |
| Spike | | | | | | | | |
| B.1.1.7 | p1C12 | C4 | Ab 38 scFv-Fc | 1 | 4 | 48.4 | 0.2667 | 1.47E−12 |
| Spike | | | | | | | | |
| B.1.1.7 | p1C12 | C5 | Ab 39 scFv-Fc | 1 | 5 | 48.4 | 0.2933 | <1.0E−12 |
| Spike | | | | | | | | |
| B.1.351 | p1D12 | D1 | Ab 35 scFv-Fc | 1 | 1 | 48.5 | 0.165 | 9.16E−12 |
| Spike | | | | | | | | |
| B.1.351 | p1D12 | D2 | Ab 36 scFv-Fc | 1 | 2 | 48.5 | 0.1342 | 8.07E−12 |
| Spike | | | | | | | | |
| B.1.351 | p1D12 | D3 | Ab 37 scFv-Fc | 1 | 3 | 48.5 | 0.1182 | 6.69E−12 |
| Spike | | | | | | | | |
| B.1.351 | p1D12 | D4 | Ab 38 scFv-Fc | 1 | 4 | 48.5 | 0.2343 | 7.62E−12 |
| Spike | | | | | | | | |
| B.1.351 | p1D12 | D5 | Ab 39 scFv-Fc | 1 | 5 | 48.5 | 0.1666 | 1.83E−12 |
| Spike | | | | | | | | |
| P.1 Spike | p1F12 | F1 | Ab 35 scFv-Fc | 1 | 1 | 48.3 | 0.1546 | 8.90E−12 |
| P.1 Spike | p1F12 | F2 | Ab 36 scFv-Fc | 1 | 2 | 48.3 | 0.1128 | 8.89E−12 |
| P.1 Spike | p1F12 | F3 | Ab 37 scFv-Fc | 1 | 3 | 48.3 | 0.1083 | 8.99E−12 |
| P.1 Spike | p1F12 | F4 | Ab 38 scFv-Fc | 1 | 4 | 48.3 | 0.2283 | 7.23E−12 |
| P.1 Spike | p1F12 | F5 | Ab 39 scFv-Fc | 1 | 5 | 48.3 | 0.1577 | 1.12E−11 |

### Other Embodiments

[0466] While the invention has been described in conjunction with the detailed description thereof, the foregoing description is intended to illustrate and not limit the scope of the invention, which is defined by the scope of the appended claims. Other aspects, advantages, and modifications are within the scope of the following claims.

What is claimed:

1. An isolated monoclonal antibody, wherein the monoclonal antibody binds to an epitope in the receptor binding domain (RBD) of the spike protein (S) of a Severe Acute Respiratory Syndrome coronavirus (SARS-CoV2), and neutralizes SARS-CoV2.

2. The monoclonal antibody of claim 1, wherein the epitope is non-linear.

3. The monoclonal antibody of claim 1, wherein the epitope comprises a region within amino acids 319-490 of the spike protein (SEQ ID NO: 980).

4. The monoclonal antibody of claim 1, wherein the epitope comprises a region within amino acids 319-541 of the spike protein (SEQ ID NO: 980).

5. The monoclonal antibody of claim 1, wherein the monoclonal antibody inhibits viral and cell membrane fusion.

6. The monoclonal antibody of claim 1, wherein the monoclonal antibody competes with the binding of a monoclonal antibody to the spike protein.

7. The monoclonal antibody of claim 1, wherein the monoclonal antibody is a fully human antibody.

8. The monoclonal antibody of claim 1, wherein the monoclonal antibody blocks the binding of SARS-CoV2 spike protein to angiotensin converting enzyme 2 (ACE2) cell surface receptor.

9. The monoclonal antibody of claim 1, wherein the monoclonal antibody comprises:
a) a heavy chain with three CDRs comprising the amino acid sequences GGSIRTHS (SEQ ID NO:93), IHHSGAT (SEQ ID NO:94), and ARGPGILSY (SEQ ID NO:95) respectively, and/or a light chain with three CDRs comprising the amino acid sequences SSNIGSNT (SEQ ID NO:227), SNN (SEQ ID NO:228), and AAWDDSLNVHYV (SEQ ID NO:229) respectively;
b) a heavy chain with three CDRs comprising the amino acid sequences GGSISSYY (SEQ ID NO:96), IYTSGST (SEQ ID NO:97), and ARDVGFGWFDR (SEQ ID NO:98) respectively and/or a light chain with three CDRs comprising the amino acid sequences SGSIASNY (SEQ ID NO:230), EDN (SEQ ID NO:231), and QSFDSASLWV (SEQ ID NO:232) respectively;
c) a heavy chain with three CDRs comprising the amino acid sequences GGSIRTHS (SEQ ID NO:99), IHHSGAT (SEQ ID NO:100), and ARGPGILSY (SEQ ID NO:101) respectively and/or a light chain with three CDRs comprising the amino acid sequences SSNIGSND (SEQ ID NO:233), SNN (SEQ ID NO:234), and ATWDDSLSAGV (SEQ ID NO:235) respectively;
d) a heavy chain with three CDRs comprising the amino acid sequences GDSVSSYSDA (SEQ ID NO:102), TYYRSKWYN (SEQ ID NO:103), and AREIVATTPFRNYYYGMDV (SEQ ID NO: 104) respectively and/or a light chain with three CDRs comprising the amino acid sequences SGSIASNY (SEQ ID NO:236), QDK (SEQ ID NO:237), and QSYDSSSLWV (SEQ ID NO:238) respectively;
e) a heavy chain with three CDRs comprising the amino acid sequences GFTFSHYD (SEQ ID NO:105), IGYDGTNL (SEQ ID NO:106), and ARAANYYDSSGYGRADAFDI (SEQ ID NO:107) respectively and/or a light chain with three CDRs comprising the amino acid sequences TGSIAGNY (SEQ ID NO:239), DDN (SEQ ID NO:240), and QSYDSGNRGV (SEQ ID NO:241) respectively;
f) a heavy chain with three CDRs comprising the amino acid sequences GFTFSDFP (SEQ ID NO: 108), ISYDGNIK (SEQ ID NO:109), and A ARGGSSFDI (SEQ ID NO:110) respectively and/or a light chain with three CDRs comprising the amino acid sequences TSNIGNNA (SEQ ID NO:242), YNE (SEQ ID NO:243), and AAWDDSLSGHVV (SEQ ID NO:244) respectively;
g) a heavy chain with three CDRs comprising the amino acid sequences GFSLSTTGVG (SEQ ID NO:111), IYWNDDK (SEQ ID NO:112), and ARISGSGYFYPFDI (SEQ ID NO:113) respectively and/or a light chain with three CDRs comprising the amino acid sequences SGSIASNY (SEQ ID NO:245), EDN (SEQ ID NO:246), and QSYDSSSLWV (SEQ ID NO:247) respectively;
h) a heavy chain with three CDRs comprising the amino acid sequences GYTFSDYY (SEQ ID NO:120), IDPNSGGT (SEQ ID NO:121), and ARDRGRGGQAGAFDY (SEQ ID NO:978) respectively and/or a light chain with three CDRs comprising the amino acid sequences KIGSKS (SEQ ID NO:254), DDS (SEQ ID NO:255), and HVWDSSSDQNV (SEQ ID NO:256) respectively;
i) a heavy chain with three CDRs comprising the amino acid sequences GFTFSSYA (SEQ ID NO:122), ISYGGSNK (SEQ ID NO:123), and AKVRGSGWYWGSAFDI (SEQ ID NO:124) respectively and/or a light chain with three CDRs comprising the amino acid sequences SLRAYF (SEQ ID NO:257), GQD (SEQ ID NO:258), and NSRDSGENHLI (SEQ ID NO:259) respectively;
j) a heavy chain with three CDRs comprising the amino acid sequences GYSFTGSH (SEQ ID NO:125), INPDSGVI (SEQ ID NO:126), and ARDKAIGYVWALDY (SEQ ID NO:127) respectively and/or a light chain with three CDRs comprising the amino acid sequences SSDVGTYNR (SEQ ID NO:260), EVS (SEQ ID NO:261), and SSYTRTFTYV (SEQ ID NO:262) respectively;
k) a heavy chain with three CDRs comprising the amino acid sequences GVSLDTIGMR (SEQ ID NO:128), IDWDDDK (SEQ ID NO: 129), and ARSGLLYDLDV (SEQ ID NO: 130) respectively and/or a light chain with three CDRs comprising the amino acid sequences DSDIGANF (SEQ ID NO:263), RNT (SEQ ID NO:264), and QSYDSSLSAYV (SEQ ID NO:265) respectively;
l) a heavy chain with three CDRs comprising the amino acid sequences GYSFTSYW (SEQ ID NO:134), IYPGDSDT (SEQ ID NO:135), and ARGWQWHDY (SEQ ID NO:136) respectively and/or a light chain with three CDRs comprising the amino acid sequences SLRSYY (SEQ ID NO:269), DKD (SEQ ID NO:270), and NSRDRSDNHVV (SEQ ID NO:271) respectively;
m) a heavy chain with three CDRs comprising the amino acid sequences GDSVSSRSSA (SEQ ID NO:137), TYYRSNWNY (SEQ ID NO:138), and VRNMRPDFDL (SEQ ID NO: 139) respectively and/or a light chain with three CDRs comprising the amino acid sequences QSVSNN (SEQ ID NO:272), DAT (SEQ ID NO:273), and QQYDNLPV (SEQ ID NO:274) respectively;
n) a heavy chain with three CDRs comprising the amino acid sequences GYTFTTSG (SEQ ID NO: 140), ISAYNGNT (SEQ ID NO:141), and ARDFHLYYGMDV (SEQ ID NO:142) respectively and/or a light chain with three CDRs comprising the amino acid sequences SSDVGAYNY (SEQ ID NO:275), DVT (SEQ ID NO:276), and AVWDDGLNGRVV (SEQ ID NO:277) respectively;
o) a heavy chain with three CDRs comprising the amino acid sequences GGTFSSYA (SEQ ID NO:143), INPNSGGT (SEQ ID NO:144), and ARGSGGYYLG (SEQ ID NO:145) respectively and/or a light chain with three CDRs comprising the amino acid sequences SNNVGNQG (SEQ ID NO:278), MNN (SEQ ID NO:279), and SAWDSSLSRWV (SEQ ID NO:280) respectively;
p) a heavy chain with three CDRs comprising the amino acid sequences GGTFSSYT (SEQ ID NO:146), IIPILGTP (SEQ ID NO:147), and AVGSGWYSGFDY (SEQ ID NO:148) respectively and/or a light chain with three CDRs comprising the amino acid sequences SGSIASNY (SEQ ID NO:281), EDS (SEQ ID NO:282), and QSFHNSNPVI (SEQ ID NO:283) respectively;
q) a heavy chain with three CDRs comprising the amino acid sequences GFTFSSYW (SEQ ID NO:149), IKQDGSEK (SEQ ID NO:150), and ARGFYYYGAFDI (SEQ ID NO:151) respectively and/or a light chain with three CDRs comprising the amino acid sequences SGSIASNY (SEQ ID NO:284), EDN (SEQ ID NO:285), and QSYDSSNHWV (SEQ ID NO:286) respectively;
r) a heavy chain with three CDRs comprising the amino acid sequences GFTFDDYA (SEQ ID NO:152), IDWNSGVI (SEQ ID NO:153), and AKDAYSYGFLGAFDI (SEQ ID NO: 154) respectively and/or a light chain with three CDRs comprising the amino acid sequences NIGSKS (SEQ ID NO:287), EDR (SEQ ID NO:288), and QVWDGDSDHYV (SEQ ID NO:289) respectively;
s) a heavy chain with three CDRs comprising the amino acid sequences GFTFDDYA (SEQ ID NO:155), IDWNSGVI (SEQ ID NO:156), and ARDILPSNFDGKKIIVFQPPAKRDLDNYYGMDV (SEQ ID NO:157) respectively and/or a light chain with three CDRs comprising the amino acid sequences SSDVGGYNL (SEQ ID NO:290), EGS (SEQ ID NO:291), and SSYTITDVVV (SEQ ID NO:292) respectively; or
t) a heavy chain with three CDRs comprising the amino acid sequences GYSFTSNW (SEQ ID NO:158), IFPGDSDT (SEQ ID NO:159), and ARESYNAYGS (SEQ ID NO:160) respectively and/or a light chain with three CDRs comprising the amino acid sequences SSNIGSNP (SEQ ID NO:293), SNN (SEQ ID NO:294), and AAWDDSLSGVV (SEQ ID NO:295) respectively.

10. The monoclonal antibody of claim 1, wherein the monoclonal antibody comprises:
a) a heavy chain with three CDRs comprising the amino acid sequences GFTFTTYG (SEQ ID NO:114), ISYDGSIK (SEQ ID NO:115), and ARVGDSSSYYGIDA (SEQ ID NO:116) respectively, and/or a light chain with three CDRs comprising the amino acid sequences SSNIGSNS (SEQ ID NO:248), SNN (SEQ ID NO:249), and AAWDDSLTGYV (SEQ ID NO:250) respectively;
b) a heavy chain with three CDRs comprising the amino acid sequences GFTFSSHA (SEQ ID NO:117), ISYDGSYT (SEQ ID NO:118), and ARDWVNFGMDV (SEQ ID NO:119) respectively, and/or a light chain with three CDRs comprising the amino acid sequences SSDVGGYNY (SEQ ID NO:251), EVS (SEQ ID NO:252), and AAWDDSLSGPV (SEQ ID NO:253) respectively; or
c) a heavy chain with three CDRs comprising the amino acid sequences GFTFSDYP (SEQ ID NO:131), TSYDGRIK (SEQ ID NO:132), and ARDPGWLRSVGMDV (SEQ ID NO:133) respectively, and/or a light chain with three CDRs comprising the amino acid sequences SGSIARNY (SEQ ID NO:266), ADR (SEQ ID NO:267), and QSYDSSNQAAV (SEQ ID NO:268) respectively.

11. The monoclonal antibody of claim 1, wherein the monoclonal antibody comprises:
a) a heavy chain with three CDRs comprising the amino acid sequences GYTFTSYG (SEQ ID NO:161), ISAYNGNT (SEQ ID NO:162), and ARGFPQLGSDY (SEQ ID NO: 163) respectively, and/or a light chain with three CDRs comprising the amino acid sequences SGSIASNY (SEQ ID NO:296), EDN (SEQ ID NO:297), and QAWDSNSYV (SEQ ID NO:298) respectively;
b) a heavy chain with three CDRs comprising the amino acid sequences GGTFSSYA (SEQ ID NO:164), ISGYNGNT (SEQ ID NO:165), and ARQMKDSGNYWEYYYYGMDV (SEQ ID NO:166) respectively, and/or a light chain with three CDRs comprising the amino acid sequences NIGSES (SEQ ID NO:299), EDR (SEQ ID NO:300), and QVWNPSGSLQYV (SEQ ID NO:301) respectively;
c) a heavy chain with three CDRs comprising the amino acid sequences GYTFTSYG (SEQ ID NO:167), ISTYNGNT (SEQ ID NO:168), and ARDVFGHFDY (SEQ ID NO:169) respectively, and/or a light chain with three CDRs comprising the amino acid sequences SGNIATNY (SEQ ID NO:302), EDN (SEQ ID NO:303), and KSYDDGNHV (SEQ ID NO:304) respectively;
d) a heavy chain with three CDRs comprising the amino acid sequences GFSLTTTGVS (SEQ ID NO:170), IHWDDDK (SEQ ID NO:171), and ASFIMTVYAEYFED (SEQ ID NO: 172) respectively, and/or a light chain with three CDRs comprising the amino acid sequences QSVSSN (SEQ ID NO:305), DVS (SEQ ID NO:306), and QQRGVWPLT (SEQ ID NO:307) respectively;
e) a heavy chain with three CDRs comprising the amino acid sequences GFSLSTSAMC (SEQ ID NO:173), IDWDNDR (SEQ ID NO:174), and AHSPYDSIWGSFRPSVYYFDY (SEQ ID NO:175) respectively, and/or a light chain with three CDRs comprising the amino acid sequences SGSIVSSY (SEQ ID NO:308), EHN (SEQ ID NO:309), and QSYDSQNGV (SEQ ID NO:310) respectively;
f) a heavy chain with three CDRs comprising the amino acid sequences GFTFSDYY (SEQ ID NO:176), ISSSSSDT (SEQ ID NO:177), and AMPTREPAY (SEQ ID NO:178) respectively, and/or a light chain with three CDRs comprising the amino acid sequences SSDLGTYNY (SEQ ID NO:311), DVF (SEQ ID NO:312), and SSYTSSSTYV (SEQ ID NO:313) respectively;
g) a heavy chain with three CDRs comprising the amino acid sequences GFAFSDFP (SEQ ID NO: 179), ISYDGSLK (SEQ ID NO:180), and AREGVSNSRPFDH (SEQ ID NO:181) respectively, and/or a light chain with three CDRs comprising the amino acid sequences SIGTKS (SEQ ID NO:314), DDS (SEQ ID NO:315), and QVWESDDDDLV (SEQ ID NO:316) respectively;
h) a heavy chain with three CDRs comprising the amino acid sequences GFTFSSYA (SEQ ID NO:182), ISSNGGST (SEQ ID NO:183), and TRDLWSGSADSFDI (SEQ ID NO:184) respectively, and/or a light chain with three CDRs comprising the amino acid sequences SLRRYY (SEQ ID NO:317), GKN (SEQ ID NO:318), and NSRDISDNQWQWI (SEQ ID NO:319) respectively;
i) a heavy chain with three CDRs comprising the amino acid sequences GFPFNAYY (SEQ ID NO:185), INQDGSEK (SEQ ID NO:186), and ARLYWWGMDV (SEQ ID NO:187) respectively, and/or a light chain with three CDRs comprising the amino acid sequences SSDVGGYKY (SEQ ID NO:320), DVN (SEQ ID NO:321), and SSYTGRMNLYV (SEQ ID NO:322) respectively;
j) a heavy chain with three CDRs comprising the amino acid sequences GFTFDDYA (SEQ ID NO:188), IDWNSGVI (SEQ ID NO:189), and AKDAYSYGFLGAFDI (SEQ ID NO:190) respectively, and/or a light chain with three CDRs comprising the amino acid sequences NIRTKG (SEQ ID NO:323), YAS (SEQ ID NO:324), and QVWDSSSDLVV (SEQ ID NO:325) respectively;
k) a heavy chain with three CDRs comprising the amino acid sequences GFTFDDYA (SEQ ID NO:191), ISWNSGSI (SEQ ID NO:192), and ARDWWGSIDH (SEQ ID NO:193) respectively, and/or a light chain with three CDRs comprising the amino acid sequences SSDVGGYDY (SEQ ID NO:326), DVS (SEQ ID NO:327), and SSYTSSSPVV (SEQ ID NO:328) respectively;
l) a heavy chain with three CDRs comprising the amino acid sequences GGSISSSNW (SEQ ID NO:194), IYHSGST (SEQ ID NO:195), and ARRGGTYHRGAFDI (SEQ ID NO:196) respectively, and/or a light chain with three CDRs comprising the amino acid sequences SRDVGSYDL (SEQ ID NO:329), EGS (SEQ ID NO:330), and SSYTSSNSLV (SEQ ID NO:331) respectively;
m) a heavy chain with three CDRs comprising the amino acid sequences GASISNSF (SEQ ID NO:197), TSYSGNS (SEQ ID NO:198), and ARREWIKGHFDY (SEQ ID NO:199) respectively, and/or a light chain with three CDRs comprising the amino acid sequences GGSIASNY (SEQ ID NO:332), EDN (SEQ ID NO:333), and QSYDSSNPVV (SEQ ID NO:334) respectively;
n) a heavy chain with three CDRs comprising the amino acid sequences GGSFTTHS (SEQ ID NO:200), ILPGGAT (SEQ ID NO:201), and ARGPGILSY (SEQ ID NO:202) respectively, and/or a light chain with three CDRs comprising the amino acid sequences SSIGSND (SEQ ID NO:335), SNN (SEQ ID NO:336), and AWDDSLSAVV (SEQ ID NO:337) respectively;
o) a heavy chain with three CDRs comprising the amino acid sequences GGSFRTHS (SEQ ID NO:203), IHHSGAT (SEQ ID NO:204), and ARGPGILSY (SEQ ID NO:205) respectively, and/or a light chain with three CDRs comprising the amino acid sequences SSNIGSNT (SEQ ID NO:338), INN (SEQ ID NO:339), and AEWYDSLNVHYV (SEQ ID NO:340) respectively;
p) a heavy chain with three CDRs comprising the amino acid sequences GGSIRTHS (SEQ ID NO:206), IHHSGAT (SEQ ID NO:207), and ARGPGILSY (SEQ ID NO:208) respectively, and/or a light chain with three CDRs comprising the amino acid sequences SSNIGSNT (SEQ ID NO:341), INN (SEQ ID NO:342), and AECYDSLNDHYV (SEQ ID NO:343) respectively;
q) a heavy chain with three CDRs comprising the amino acid sequences GGSIRTHS (SEQ ID NO:209), IHHSGAT (SEQ ID NO:210), and GRGPGILSY (SEQ ID NO:211) respectively, and/or a light chain with three CDRs comprising the amino acid sequences SSNIGSNT (SEQ ID NO:344), SNN (SEQ ID NO:345), and AAWDDSLNVHYV (SEQ ID NO:346) respectively;
r) a heavy chain with three CDRs comprising the amino acid sequences GYSFTSYW (SEQ ID NO:212), IYPGDSDT (SEQ ID NO:213), and ARQGDGGGYDY (SEQ ID NO:214) respectively, and/or a light chain with three CDRs comprising the amino acid sequences SSNIGSNP (SEQ ID NO:347), NNN (SEQ ID NO:348), and AAWDDSLNGL (SEQ ID NO:349) respectively;
s) a heavy chain with three CDRs comprising the amino acid sequences RYSFSNYW (SEQ ID NO:215), IYPYDSDT (SEQ ID NO:216), and ARQGSSQSFDI (SEQ ID NO:217) respectively, and/or a light chain with three CDRs comprising the amino acid sequences SLRSYY (SEQ ID NO:350), QDS (SEQ ID NO:351), and QAWDSNSYV (SEQ ID NO:352) respectively;
t) a heavy chain with three CDRs comprising the amino acid sequences GYSFTSYW (SEQ ID NO:218), IYPGDSDT (SEQ ID NO:219), and ARRRGSAAAFDT (SEQ ID NO:220) respectively, and/or a light chain with three CDRs comprising the amino acid sequences SSNIGSNP (SEQ ID NO:353), DNN (SEQ ID NO:354), and EAWDDSLSGPV (SEQ ID NO:355) respectively;
u) a heavy chain with three CDRs comprising the amino acid sequences GYSFTSYW (SEQ ID NO:221), IYPGDSDT (SEQ ID NO:222), and ARTTYSYGSFDY (SEQ ID NO:223) respectively, and/or a light chain with three CDRs comprising the amino acid sequences SSNIGGNS (SEQ ID NO:356), RNN (SEQ ID NO:357), and AAWDDSLNGWV (SEQ ID NO:358) respectively;
v) a heavy chain with three CDRs comprising the amino acid sequences GDSVTSNSAA (SEQ ID NO:224), TYYSSKWYN (SEQ ID NO:225), and ARGWLRLSFDP (SEQ ID NO:226) respectively, and/or a light chain with three CDRs comprising the amino acid sequences SGSIASNY (SEQ ID NO:359), EDN (SEQ ID NO:360), and QSYDPNNHGVV (SEQ ID NO:361) respectively; or
w) a heavy chain with three CDRs comprising the amino acid sequences GFSLTTSGVS (SEQ ID NO:983), IHWDDDK (SEQ ID NO:984), and ASFIMTVYAEYFED (SEQ ID NO:985) respectively, and/or a light chain with three CDRs comprising the amino acid sequences QSVSSN (SEQ ID NO:986), DVS (SEQ ID NO:987), and QQRGAWPLT (SEQ ID NO:988) respectively.

12. The monoclonal antibody of claim 1, wherein the monoclonal antibody comprises:
a) a V_{H} amino acid sequence having SEQ ID NO: 1, and a V_{L} amino acid sequence having SEQ ID NO: 2;
b) a V_{H} amino acid sequence having SEQ ID NO: 3, and a V_{L} amino acid sequence having SEQ ID NO: 4;
c) a V_{H} amino acid sequence having SEQ ID NO: 5, and a V_{L} amino acid sequence having SEQ ID NO: 6;
d) a V_{H} amino acid sequence having SEQ ID NO: 7, and a V_{L} amino acid sequence having SEQ ID NO: 8;
e) a V_{H} amino acid sequence having SEQ ID NO: 9, and a V_{L} amino acid sequence having SEQ ID NO: 10;
f) a V_{H} amino acid sequence having SEQ ID NO: 11, and a V_{L} amino acid sequence having SEQ ID NO: 12;
g) a V_{H} amino acid sequence having SEQ ID NO: 13, and a V_{L} amino acid sequence having SEQ ID NO: 14;
h) a V_{H} amino acid sequence having SEQ ID NO: 19, and a V_{L} amino acid sequence having SEQ ID NO: 20;
i) a V_{H} amino acid sequence having SEQ ID NO: 21, and a V_{L} amino acid sequence having SEQ ID NO: 22;
j) a V_{H} amino acid sequence having SEQ ID NO: 23, and a V_{L} amino acid sequence having SEQ ID NO: 24;
k) a V_{H} amino acid sequence having SEQ ID NO: 25, and a V_{L} amino acid sequence having SEQ ID NO: 26;
1) a V_{H} amino acid sequence having SEQ ID NO: 29, and a V_{L} amino acid sequence having SEQ ID NO: 30;
m) a V_{H} amino acid sequence having SEQ ID NO: 31, and a V_{L} amino acid sequence having SEQ ID NO: 32;
n) a V_{H} amino acid sequence having SEQ ID NO: 33, and a V_{L} amino acid sequence having SEQ ID NO: 34;
o) a V_{H} amino acid sequence having SEQ ID NO: 35, and a V_{L} amino acid sequence having SEQ ID NO: 36;
p) a V_{H} amino acid sequence having SEQ ID NO: 37, and a V_{L} amino acid sequence having SEQ ID NO: 38;
q) a V_{H} amino acid sequence having SEQ ID NO: 39, and a V_{L} amino acid sequence having SEQ ID NO: 40;
r) a V_{H} amino acid sequence having SEQ ID NO: 41, and a V_{L} amino acid sequence having SEQ ID NO: 42;
s) a V_{H} amino acid sequence having SEQ ID NO: 43, and a V_{L} amino acid sequence having SEQ ID NO: 44; or
t) a V_{H} amino acid sequence having SEQ ID NO: 47, and a V_{L} amino acid sequence having SEQ ID NO: 48.

13. The monoclonal antibody of claim 1, wherein the monoclonal antibody comprises:
a) a V_{H} amino acid sequence having SEQ ID NO: 15, and a V_{L} amino acid sequence having SEQ ID NO: 16;
b) a V_{H} amino acid sequence having SEQ ID NO: 17, and a V_{L} amino acid sequence having SEQ ID NO: 18; or
c) a V_{H} amino acid sequence having SEQ ID NO: 27, and a V_{L} amino acid sequence having SEQ ID NO: 28.

14. The monoclonal antibody of claim 1, wherein the monoclonal antibody comprises:
a) a V_{H} amino acid sequence having SEQ ID NO: 49, and a V_{L} amino acid sequence having SEQ ID NO: 50;
b) a V_{H} amino acid sequence having SEQ ID NO: 51, and a V_{L} amino acid sequence having SEQ ID NO: 52;
c) a V_{H} amino acid sequence having SEQ ID NO: 53, and a V_{L} amino acid sequence having SEQ ID NO: 54;
d) a V_{H} amino acid sequence having SEQ ID NO: 55, and a V_{L} amino acid sequence having SEQ ID NO: 56;
e) a V_{H} amino acid sequence having SEQ ID NO: 57, and a V_{L} amino acid sequence having SEQ ID NO: 58;
f) a V_{H} amino acid sequence having SEQ ID NO: 59, and a V_{L} amino acid sequence having SEQ ID NO: 60;
g) a V_{H} amino acid sequence having SEQ ID NO: 61, and a V_{L} amino acid sequence having SEQ ID NO: 62;
h) a V_{H} amino acid sequence having SEQ ID NO: 63, and a V_{L} amino acid sequence having SEQ ID NO: 64;
i) a V_{H} amino acid sequence having SEQ ID NO: 65, and a V_{L} amino acid sequence having SEQ ID NO: 66;
j) a V_{H} amino acid sequence having SEQ ID NO: 67, and a V_{L} amino acid sequence having SEQ ID NO: 68;
k) a V_{H} amino acid sequence having SEQ ID NO: 69, and a V_{L} amino acid sequence having SEQ ID NO: 70;
1) a V_{H} amino acid sequence having SEQ ID NO: 71, and a V_{L} amino acid sequence having SEQ ID NO: 72;
m) a V_{H} amino acid sequence having SEQ ID NO: 73, and a V_{L} amino acid sequence having SEQ ID NO: 74;
n) a V_{H} amino acid sequence having SEQ ID NO: 75, and a V_{L} amino acid sequence having SEQ ID NO: 76;
o) a V_{H} amino acid sequence having SEQ ID NO: 77, and a V_{L} amino acid sequence having SEQ ID NO: 78;
p) a V_{H} amino acid sequence having SEQ ID NO: 79, and a V_{L} amino acid sequence having SEQ ID NO: 80;
q) a V_{H} amino acid sequence having SEQ ID NO: 81, and a V_{L} amino acid sequence having SEQ ID NO: 82;
r) a V_{H} amino acid sequence having SEQ ID NO: 83, and a V_{L} amino acid sequence having SEQ ID NO: 84;
s) a V_{H} amino acid sequence having SEQ ID NO: 85, and a V_{L} amino acid sequence having SEQ ID NO: 86;
t) a V_{H} amino acid sequence having SEQ ID NO: 87, and a V_{L} amino acid sequence having SEQ ID NO: 88;
u) a V_{H} amino acid sequence having SEQ ID NO: 89, and a V_{L} amino acid sequence having SEQ ID NO: 90;
v) a V_{H} amino acid sequence having SEQ ID NO: 91, and a V_{L} amino acid sequence having SEQ ID NO: 92; or
w) a V_{H} amino acid sequence having SEQ ID NO: 981, and a V_{L} amino acid sequence having SEQ ID NO: 982.

15. An isolated scFv antibody, wherein the antibody binds to an epitope in the receptor binding domain (RBD) of the spike protein of a Severe Acute Respiratory Syndrome coronavirus (SARS-CoV2), and neutralizes SARS-CoV2.

16. The antibody of claim 15, wherein the epitope is non-linear.

17. The antibody of claim 16, wherein the epitope comprises a region within amino acids 319-490 of the spike protein (SEQ ID NO: 980).

18. The antibody of claim 16, wherein the epitope comprises a region within amino acids 319-541 of the spike protein (SEQ ID NO: 980).

19. The antibody of claim 15, wherein the antibody inhibits viral and cell membrane fusion.

20. The antibody of claim 15, wherein the antibody competes with the binding of a monoclonal antibody to the spike protein.

21. The antibody of claim 15, wherein the antibody is a fully human antibody.

22. The antibody of claim 15, wherein the antibody blocks the binding of SARS-CoV2 spike protein to angiotensin converting enzyme 2 (ACE2) cell surface receptor.

23. The antibody of claim 15, wherein the antibody comprises:
a) a heavy chain with three CDRs comprising the amino acid sequences GGSIRTHS (SEQ ID NO:93), IHHSGAT (SEQ ID NO:94), and ARGPGILSY (SEQ ID NO:95) respectively, and/or a light chain with three CDRs comprising the amino acid sequences SSNIGSNT (SEQ ID NO:227), SNN (SEQ ID NO:228), and AAWDDSLNVHYV (SEQ ID NO:229) respectively;
b) a heavy chain with three CDRs comprising the amino acid sequences GGSISSYY (SEQ ID NO:96), IYTSGST (SEQ ID NO:97), and ARDVGFGWFDR (SEQ ID NO:98) respectively and/or a light chain with three CDRs comprising the amino acid sequences SGSIASNY (SEQ ID NO:230), EDN (SEQ ID NO:231), and QSFDSASLWV (SEQ ID NO:232) respectively;
c) a heavy chain with three CDRs comprising the amino acid sequences GGSIRTHS (SEQ ID NO:99), IHHSGAT (SEQ ID NO:100), and ARGPGILSY (SEQ ID NO:101) respectively and/or a light chain with three CDRs comprising the amino acid sequences SSNIGSND (SEQ ID NO:233), SNN (SEQ ID NO:234), and ATWDDSLSAGV (SEQ ID NO:235) respectively;
d) a heavy chain with three CDRs comprising the amino acid sequences GDSVSSYSDA (SEQ ID NO:102), TYYRSKWYN (SEQ ID NO:103), and AREIVATTPFRNYYYGMDV (SEQ ID NO: 104) respectively and/or a light chain with three CDRs comprising the amino acid sequences SGSIASNY (SEQ ID NO:236), QDK (SEQ ID NO:237), and QSYDSSSLWV (SEQ ID NO:238) respectively;
e) a heavy chain with three CDRs comprising the amino acid sequences GFTFSHYD (SEQ ID NO:105), IGYDGTNL (SEQ ID NO:106), and ARAANYYDSSGYGRADAFDI (SEQ ID NO:107) respectively and/or a light chain with three CDRs comprising the amino acid sequences TGSIAGNY (SEQ ID NO:239), DDN (SEQ ID NO:240), and QSYDSGNRGV (SEQ ID NO:241) respectively;
f) a heavy chain with three CDRs comprising the amino acid sequences GFTFSDFP (SEQ ID NO: 108), ISYDGNIK (SEQ ID NO:109), and A ARGGSSFDI (SEQ ID NO:110) respectively and/or a light chain with three CDRs comprising the amino acid sequences TSNIGNNA (SEQ ID NO:242), YNE (SEQ ID NO:243), and AAWDDSLSGHVV (SEQ ID NO:244) respectively;
g) a heavy chain with three CDRs comprising the amino acid sequences GFSLSTTGVG (SEQ ID NO:111), IYWNDDK (SEQ ID NO:112), and ARISGSGYFYPFDI (SEQ ID NO:113) respectively and/or a light chain with three CDRs comprising the amino acid sequences SGSIASNY (SEQ ID NO:245), EDN (SEQ ID NO:246), and QSYDSSSLWV (SEQ ID NO:247) respectively;
h) a heavy chain with three CDRs comprising the amino acid sequences GYTFSDYY (SEQ ID NO:120), IDPNSGGT (SEQ ID NO:121), and ARDRGRGGQAGAFDY (SEQ ID NO:978) respectively and/or a light chain with three CDRs comprising the amino acid sequences KIGSKS (SEQ ID NO:254), DDS (SEQ ID NO:255), and HVWDSSSDQNV (SEQ ID NO:256) respectively;
i) a heavy chain with three CDRs comprising the amino acid sequences GFTFSSYA (SEQ ID NO:122), ISYGGSNK (SEQ ID NO:123), and AKVRGSGWYWGSAFDI (SEQ ID NO:124) respectively and/or a light chain with three CDRs comprising the amino acid sequences SLRAYF (SEQ ID NO:257), GQD (SEQ ID NO:258), and NSRDSGENHLI (SEQ ID NO:259) respectively;
j) a heavy chain with three CDRs comprising the amino acid sequences GYSFTGSH (SEQ ID NO:125), INPDSGVI (SEQ ID NO:126), and ARDKAIGYVWALDY (SEQ ID NO:127) respectively and/or a light chain with three CDRs comprising the amino acid sequences SSDVGTYNR (SEQ ID NO:260), EVS (SEQ ID NO:261), and SSYTRTFTYV (SEQ ID NO:262) respectively;
k) a heavy chain with three CDRs comprising the amino acid sequences GVSLDTIGMR (SEQ ID NO:128), IDWDDDK (SEQ ID NO: 129), and ARSGLLYDLDV (SEQ ID NO:130) respectively and/or a light chain with three CDRs comprising the amino acid sequences DSDIGANF (SEQ ID NO:263), RNT (SEQ ID NO:264), and QSYDSSLSAYV (SEQ ID NO:265) respectively;
l) a heavy chain with three CDRs comprising the amino acid sequences GYSFTSYW (SEQ ID NO:134), IYPGDSDT (SEQ ID NO:135), and ARGWQWHDY (SEQ ID NO:136) respectively and/or a light chain with three CDRs comprising the amino acid sequences SLRSYY (SEQ ID NO:269), DKD (SEQ ID NO:270), and NSRDRSDNHVV (SEQ ID NO:271) respectively;
m) a heavy chain with three CDRs comprising the amino acid sequences GDSVSSRSSA (SEQ ID NO:137), TYYRSNWNY (SEQ ID NO:138), and VRNMRPDFDL (SEQ ID NO: 139) respectively and/or a light chain with three CDRs comprising the amino acid sequences QSVSNN (SEQ ID NO:272), DAT (SEQ ID NO:273), and QQYDNLPV (SEQ ID NO:274) respectively;
n) a heavy chain with three CDRs comprising the amino acid sequences GYTFTTSG (SEQ ID NO: 140), ISAYNGNT (SEQ ID NO:141), and ARDFHLYYGMDV (SEQ ID NO:142) respectively and/or a light chain with three CDRs comprising the amino acid sequences SSDVGAYNY (SEQ ID NO:275), DVT (SEQ ID NO:276), and AVWDDGLNGRVV (SEQ ID NO:277) respectively;
o) a heavy chain with three CDRs comprising the amino acid sequences GGTFSSYA (SEQ ID NO:143), INPNSGGT (SEQ ID NO:144), and ARGSGGYYLG (SEQ ID NO:145) respectively and/or a light chain with three CDRs comprising the amino acid sequences SNNVGNQG (SEQ ID NO:278), MNN (SEQ ID NO:279), and SAWDSSLSRWV (SEQ ID NO:280) respectively;
p) a heavy chain with three CDRs comprising the amino acid sequences GGTFSSYT (SEQ ID NO:146), IIPILGTP (SEQ ID NO:147), and AVGSGWYSGFDY (SEQ ID NO:148) respectively and/or a light chain with three CDRs comprising the amino acid sequences SGSIASNY (SEQ ID NO:281), EDS (SEQ ID NO:282), and QSFHNSNPVI (SEQ ID NO:283) respectively;
q) a heavy chain with three CDRs comprising the amino acid sequences GFTFSSYW (SEQ ID NO:149), IKQDGSEK (SEQ ID NO:150), and ARGFYYYGAFDI (SEQ ID NO:151) respectively and/or a light chain with three CDRs comprising the amino acid sequences SGSIASNY (SEQ ID NO:284), EDN (SEQ ID NO:285), and QSYDSSNHWV (SEQ ID NO:286) respectively;
r) a heavy chain with three CDRs comprising the amino acid sequences GFTFDDYA (SEQ ID NO:152), IDWNSGVI (SEQ ID NO:153), and AKDAYSYGFLGAFDI (SEQ ID NO:154) respectively and/or a light chain with three CDRs comprising the amino acid sequences NIGSKS (SEQ ID NO:287), EDR (SEQ ID NO:288), and QVWDGDSDHYV (SEQ ID NO:289) respectively;
s) a heavy chain with three CDRs comprising the amino acid sequences GFTFDDYA (SEQ ID NO:155), IDWNSGVI (SEQ ID NO:156), and ARDILPSNFDGKKIIVFQPPAKRDLDNYYGMDV (SEQ ID NO:157) respectively and/or a light chain with three CDRs comprising the amino acid sequences SSDVGGYNL (SEQ ID NO:290), EGS (SEQ ID NO:291), and SSYTITDVVV (SEQ ID NO:292) respectively; or
t) a heavy chain with three CDRs comprising the amino acid sequences GYSFTSNW (SEQ ID NO:158), IFPGDSDT (SEQ ID NO:159), and ARESYNAYGS (SEQ ID NO:160) respectively and/or a light chain with three CDRs comprising the amino acid sequences SSNIGSNP (SEQ ID NO:293), SNN (SEQ ID NO:294), and AAWDDSLSGVV (SEQ ID NO:295) respectively.

24. The antibody of claim 15, wherein the antibody comprises:
a) a heavy chain with three CDRs comprising the amino acid sequences GFTFTTYG (SEQ ID NO:114), ISYDGSIK (SEQ ID NO:115), and ARVGDSSSYYGIDA (SEQ ID NO:116) respectively, and/or a light chain with three CDRs comprising the amino acid sequences SSNIGSNS (SEQ ID NO:248), SNN (SEQ ID NO:249), and AAWDDSLTGYV (SEQ ID NO:250) respectively;
b) a heavy chain with three CDRs comprising the amino acid sequences GFTFSSHA (SEQ ID NO:117), ISYDGSYT (SEQ ID NO:118), and ARDWVNFGMDV (SEQ ID NO:119) respectively, and/or a light chain with three CDRs comprising the amino acid sequences SSDVGGYNY (SEQ ID NO:251), EVS (SEQ ID NO:252), and AAWDDSLSGPV (SEQ ID NO:253) respectively; or
c) a heavy chain with three CDRs comprising the amino acid sequences GFTFSDYP (SEQ ID NO:131), TSYDGRIK (SEQ ID NO:132), and ARDPGWLRSVGMDV (SEQ ID NO:133) respectively, and/or a light chain with three CDRs comprising the amino acid sequences SGSIARNY (SEQ ID NO:266), ADR (SEQ ID NO:267), and QSYDSSNQAAV (SEQ ID NO:268) respectively.

25. The antibody of claim 15, wherein the antibody comprises:
a) a heavy chain with three CDRs comprising the amino acid sequences GYTFTSYG (SEQ ID NO:161), ISAYNGNT (SEQ ID NO:162), and ARGFPQLGSDY (SEQ ID NO: 163) respectively, and/or a light chain with three CDRs comprising the amino acid sequences SGSIASNY (SEQ ID NO:296), EDN (SEQ ID NO:297), and QAWDSNSYV (SEQ ID NO:298) respectively;
b) a heavy chain with three CDRs comprising the amino acid sequences GGTFSSYA (SEQ ID NO:164), ISGYNGNT (SEQ ID NO:165), and ARQMKDSGNYWEYYYYGMDV (SEQ ID NO:166) respectively, and/or a light chain with three CDRs comprising the amino acid sequences NIGSES (SEQ ID NO:299), EDR (SEQ ID NO:300), and QVWNPSGSLQYV (SEQ ID NO:301) respectively;
c) a heavy chain with three CDRs comprising the amino acid sequences GYTFTSYG (SEQ ID NO:167), ISTYNGNT (SEQ ID NO:168), and ARDVFGHFDY (SEQ ID NO:169) respectively, and/or a light chain with three CDRs comprising the amino acid sequences SGNIATNY (SEQ ID NO:302), EDN (SEQ ID NO:303), and KSYDDGNHV (SEQ ID NO:304) respectively;
d) a heavy chain with three CDRs comprising the amino acid sequences GFSLTTTGVS (SEQ ID NO:170), IHWDDDK (SEQ ID NO:171), and ASFIMTVYAEYFED (SEQ ID NO: 172) respectively, and/or a light chain with three CDRs comprising the amino acid sequences QSVSSN (SEQ ID NO:305), DVS (SEQ ID NO:306), and QQRGVWPLT (SEQ ID NO:307) respectively;
e) a heavy chain with three CDRs comprising the amino acid sequences GFSLSTSAMC (SEQ ID NO:173), IDWDNDR (SEQ ID NO:174), and AHSPYDSIWGSFRPSVYYFDY (SEQ ID NO:175) respectively, and/or a light chain with three CDRs comprising the amino acid sequences SGSIVSSY (SEQ ID NO:308), EHN (SEQ ID NO:309), and QSYDSQNGV (SEQ ID NO:310) respectively;
f) a heavy chain with three CDRs comprising the amino acid sequences GFTFSDYY (SEQ ID NO:176), ISSSSSDT (SEQ ID NO:177), and AMPTREPAY (SEQ ID NO:178) respectively, and/or a light chain with three CDRs comprising the amino acid sequences SSDLGTYNY (SEQ ID NO:311), DVF (SEQ ID NO:312), and SSYTSSSTYV (SEQ ID NO:313) respectively;
g) a heavy chain with three CDRs comprising the amino acid sequences GFAFSDFP (SEQ ID NO: 179), ISYDGSLK (SEQ ID NO:180), and AREGVSNSRPFDH (SEQ ID NO:181) respectively, and/or a light chain with three CDRs comprising the amino acid sequences SIGTKS (SEQ ID NO:314), DDS (SEQ ID NO:315), and QVWESDDDDLV (SEQ ID NO:316) respectively;
h) a heavy chain with three CDRs comprising the amino acid sequences GFTFSSYA (SEQ ID NO:182), ISSNGGST (SEQ ID NO:183), and TRDLWSGSADSFDI (SEQ ID NO:184) respectively, and/or a light chain with three CDRs comprising the amino acid sequences SLRRYY (SEQ ID NO:317), GKN (SEQ ID NO:318), and NSRDISDNQWQWI (SEQ ID NO:319) respectively;
i) a heavy chain with three CDRs comprising the amino acid sequences GFPFNAYY (SEQ ID NO:185), INQDGSEK (SEQ ID NO:186), and ARLYWWGMDV (SEQ ID NO:187) respectively, and/or a light chain with three CDRs comprising the amino acid sequences SSDVGGYKY (SEQ ID NO:320), DVN (SEQ ID NO:321), and SSYTGRMNLYV (SEQ ID NO:322) respectively;
j) a heavy chain with three CDRs comprising the amino acid sequences GFTFDDYA (SEQ ID NO:188), IDWNSGVI (SEQ ID NO:189), and AKDAYSYGFLGAFDI (SEQ ID NO:190) respectively, and/or a light chain with three CDRs comprising the amino acid sequences NIRTKG (SEQ ID NO:323), YAS (SEQ ID NO:324), and QVWDSSSDLVV (SEQ ID NO:325) respectively;
k) a heavy chain with three CDRs comprising the amino acid sequences GFTFDDYA (SEQ ID NO:191), ISWNSGSI (SEQ ID NO:192), and ARDWWGSIDH (SEQ ID NO:193) respectively, and/or a light chain with three CDRs comprising the amino acid sequences SSDVGGYDY (SEQ ID NO:326), DVS (SEQ ID NO:327), and SSYTSSSPVV (SEQ ID NO:328) respectively;
l) a heavy chain with three CDRs comprising the amino acid sequences GGSISSSNW (SEQ ID NO:194), IYHSGST (SEQ ID NO:195), and ARRGGTYHRGAFDI (SEQ ID NO:196) respectively, and/or a light chain with three CDRs comprising the amino acid sequences SRDVGSYDL (SEQ ID NO:329), EGS (SEQ ID NO:330), and SSYTSSNSLV (SEQ ID NO:331) respectively;
m) a heavy chain with three CDRs comprising the amino acid sequences GASISNSF (SEQ ID NO:197), TSYSGNS (SEQ ID NO:198), and ARREWIKGHFDY (SEQ ID NO:199) respectively, and/or a light chain with three CDRs comprising the amino acid sequences GGSIASNY (SEQ ID NO:332), EDN (SEQ ID NO:333), and QSYDSSNPVV (SEQ ID NO:334) respectively;
n) a heavy chain with three CDRs comprising the amino acid sequences GGSFTTHS (SEQ ID NO:200), ILPGGAT (SEQ ID NO:201), and ARGPGILSY (SEQ ID NO:202) respectively, and/or a light chain with three CDRs comprising the amino acid sequences SSIGSND (SEQ ID NO:335), SNN (SEQ ID NO:336), and AWDDSLSAVV (SEQ ID NO:337) respectively;
o) a heavy chain with three CDRs comprising the amino acid sequences GGSFRTHS (SEQ ID NO:203), IHHSGAT (SEQ ID NO:204), and ARGPGILSY (SEQ ID NO:205) respectively, and/or a light chain with three CDRs comprising the amino acid sequences SSNIGSNT (SEQ ID NO:338), INN (SEQ ID NO:339), and AEWYDSLNVHYV (SEQ ID NO:340) respectively;
p) a heavy chain with three CDRs comprising the amino acid sequences GGSIRTHS (SEQ ID NO:206), IHHSGAT (SEQ ID NO:207), and ARGPGILSY (SEQ ID NO:208) respectively, and/or a light chain with three CDRs comprising the amino acid sequences SSNIGSNT (SEQ ID NO:341), INN (SEQ ID NO:342), and AECYDSLNDHYV (SEQ ID NO:343) respectively;
q) a heavy chain with three CDRs comprising the amino acid sequences GGSIRTHS (SEQ ID NO:209), IHHSGAT (SEQ ID NO:210), and GRGPGILSY (SEQ ID NO:211) respectively, and/or a light chain with three CDRs comprising the amino acid sequences SSNIGSNT (SEQ ID NO:344), SNN (SEQ ID NO:345), and AAWDDSLNVHYV (SEQ ID NO:346) respectively;
r) a heavy chain with three CDRs comprising the amino acid sequences GYSFTSYW (SEQ ID NO:212), IYPGDSDT (SEQ ID NO:213), and ARQGDGGGYDY (SEQ ID NO:214) respectively, and/or a light chain with three CDRs comprising the amino acid sequences SSNIGSNP (SEQ ID NO:347), NNN (SEQ ID NO:348), and AAWDDSLNGL (SEQ ID NO:349) respectively;
s) a heavy chain with three CDRs comprising the amino acid sequences RYSFSNYW (SEQ ID NO:215), IYPYDSDT (SEQ ID NO:216), and ARQGSSQSFDI (SEQ ID NO:217) respectively, and/or a light chain with three CDRs comprising the amino acid sequences SLRSYY (SEQ ID NO:350), QDS (SEQ ID NO:351), and QAWDSNSYV (SEQ ID NO:352) respectively;
t) a heavy chain with three CDRs comprising the amino acid sequences GYSFTSYW (SEQ ID NO:218), IYPGDSDT (SEQ ID NO:219), and ARRRGSAAAFDT (SEQ ID NO:220) respectively, and/or a light chain with three CDRs comprising the amino acid sequences SSNIGSNP (SEQ ID NO:353), DNN (SEQ ID NO:354), and EAWDDSLSGPV (SEQ ID NO:355) respectively;
u) a heavy chain with three CDRs comprising the amino acid sequences GYSFTSYW (SEQ ID NO:221), IYPGDSDT (SEQ ID NO:222), and ARTTYSYGSFDY (SEQ ID NO:223) respectively, and/or a light chain with three CDRs comprising the amino acid sequences SSNIGGNS (SEQ ID NO:356), RNN (SEQ ID NO:357), and AAWDDSLNGWV (SEQ ID NO:358) respectively;
v) a heavy chain with three CDRs comprising the amino acid sequences GDSVTSNSAA (SEQ ID NO:224), TYYSSKWYN (SEQ ID NO:225), and ARGWLRLSFDP (SEQ ID NO:226) respectively, and/or a light chain with three CDRs comprising the amino acid sequences SGSIASNY (SEQ ID NO:359), EDN (SEQ ID NO:360), and QSYDPNNHGVV (SEQ ID NO:361) respectively; or
w) a heavy chain with three CDRs comprising the amino acid sequences GFSLTTSGVS (SEQ ID NO:983), IHWDDDK (SEQ ID NO:984), and ASFIMTVYAEYFED (SEQ ID NO:985) respectively, and/or a light chain with three CDRs comprising the amino acid sequences QSVSSN (SEQ ID NO:986), DVS (SEQ ID NO:987), and QQRGAWPLT (SEQ ID NO:988) respectively.

26. The antibody of claim 15, wherein the antibody comprises:
a) a V_{H} amino acid sequence having SEQ ID NO: 1, and a V_{L} amino acid sequence having SEQ ID NO: 2;
b) a V_{H} amino acid sequence having SEQ ID NO: 3, and a V_{L} amino acid sequence having SEQ ID NO: 4;
c) a V_{H} amino acid sequence having SEQ ID NO: 5, and a V_{L} amino acid sequence having SEQ ID NO: 6;
d) a V_{H} amino acid sequence having SEQ ID NO: 7, and a V_{L} amino acid sequence having SEQ ID NO: 8;
e) a V_{H} amino acid sequence having SEQ ID NO: 9, and a V_{L} amino acid sequence having SEQ ID NO: 10;
f) a V_{H} amino acid sequence having SEQ ID NO: 11, and a V_{L} amino acid sequence having SEQ ID NO: 12;
g) a V_{H} amino acid sequence having SEQ ID NO: 13, and a V_{L} amino acid sequence having SEQ ID NO: 14;
h) a V_{H} amino acid sequence having SEQ ID NO: 19, and a V_{L} amino acid sequence having SEQ ID NO: 20;
i) a V_{H} amino acid sequence having SEQ ID NO: 21, and a V_{L} amino acid sequence having SEQ ID NO: 22;
j) a V_{H} amino acid sequence having SEQ ID NO: 23, and a V_{L} amino acid sequence having SEQ ID NO: 24;
k) a V_{H} amino acid sequence having SEQ ID NO: 25, and a V_{L} amino acid sequence having SEQ ID NO: 26;
l) a V_{H} amino acid sequence having SEQ ID NO: 29, and a V_{L} amino acid sequence having SEQ ID NO: 30;
m) a V_{H} amino acid sequence having SEQ ID NO: 31, and a V_{L} amino acid sequence having SEQ ID NO: 32;
n) a V_{H} amino acid sequence having SEQ ID NO: 33, and a V_{L} amino acid sequence having SEQ ID NO: 34;
o) a V_{H} amino acid sequence having SEQ ID NO: 35, and a V_{L} amino acid sequence having SEQ ID NO: 36;
p) a V_{H} amino acid sequence having SEQ ID NO: 37, and a V_{L} amino acid sequence having SEQ ID NO: 38;
q) a V_{H} amino acid sequence having SEQ ID NO: 39, and a V_{L} amino acid sequence having SEQ ID NO: 40;
r) a V_{H} amino acid sequence having SEQ ID NO: 41, and a V_{L} amino acid sequence having SEQ ID NO: 42;
s) a V_{H} amino acid sequence having SEQ ID NO: 43, and a V_{L} amino acid sequence having SEQ ID NO: 44; or
t) a V_{H} amino acid sequence having SEQ ID NO: 47, and a V_{L} amino acid sequence having SEQ ID NO: 48.

27. The antibody of claim 15, wherein the antibody comprises:
a) a V_{H} amino acid sequence having SEQ ID NO: 15, and a V_{L} amino acid sequence having SEQ ID NO: 16;
b) a V_{H} amino acid sequence having SEQ ID NO: 17, and a V_{L} amino acid sequence having SEQ ID NO: 18; or
c) a V_{H} amino acid sequence having SEQ ID NO: 27, and a V_{L} amino acid sequence having SEQ ID NO: 28.

28. The antibody of claim 15, wherein the antibody comprises:
a) a V_{H} amino acid sequence having SEQ ID NO: 49, and a V_{L} amino acid sequence having SEQ ID NO: 50;
b) a V_{H} amino acid sequence having SEQ ID NO: 51, and a V_{L} amino acid sequence having SEQ ID NO: 52;
c) a V_{H} amino acid sequence having SEQ ID NO: 53, and a V_{L} amino acid sequence having SEQ ID NO: 54;
d) a V_{H} amino acid sequence having SEQ ID NO: 55, and a V_{L} amino acid sequence having SEQ ID NO: 56;
e) a V_{H} amino acid sequence having SEQ ID NO: 57, and a V_{L} amino acid sequence having SEQ ID NO: 58;
f) a V_{H} amino acid sequence having SEQ ID NO: 59, and a V_{L} amino acid sequence having SEQ ID NO: 60;
g) a V_{H} amino acid sequence having SEQ ID NO: 61, and a V_{L} amino acid sequence having SEQ ID NO: 62;
h) a V_{H} amino acid sequence having SEQ ID NO: 63, and a V_{L} amino acid sequence having SEQ ID NO: 64;
i) a V_{H} amino acid sequence having SEQ ID NO: 65, and a V_{L} amino acid sequence having SEQ ID NO: 66;
j) a V_{H} amino acid sequence having SEQ ID NO: 67, and a V_{L} amino acid sequence having SEQ ID NO: 68;
k) a V_{H} amino acid sequence having SEQ ID NO: 69, and a V_{L} amino acid sequence having SEQ ID NO: 70;
1) a V_{H} amino acid sequence having SEQ ID NO: 71, and a V_{L} amino acid sequence having SEQ ID NO: 72;
m) a V_{H} amino acid sequence having SEQ ID NO: 73, and a V_{L} amino acid sequence having SEQ ID NO: 74;
n) a V_{H} amino acid sequence having SEQ ID NO: 75, and a V_{L} amino acid sequence having SEQ ID NO: 76;
o) a V_{H} amino acid sequence having SEQ ID NO: 77, and a V_{L} amino acid sequence having SEQ ID NO: 78;
p) a V_{H} amino acid sequence having SEQ ID NO: 79, and a V_{L} amino acid sequence having SEQ ID NO: 80;
q) a V_{H} amino acid sequence having SEQ ID NO: 81, and a V_{L} amino acid sequence having SEQ ID NO: 82;
r) a V_{H} amino acid sequence having SEQ ID NO: 83, and a V_{L} amino acid sequence having SEQ ID NO: 84;
s) a V_{H} amino acid sequence having SEQ ID NO: 85, and a V_{L} amino acid sequence having SEQ ID NO: 86;
t) a V_{H} amino acid sequence having SEQ ID NO: 87, and a V_{L} amino acid sequence having SEQ ID NO: 88;
u) a V_{H} amino acid sequence having SEQ ID NO: 89, and a V_{L} amino acid sequence having SEQ ID NO: 90; or
v) a V_{H} amino acid sequence having SEQ ID NO: 91, and a V_{L} amino acid sequence having SEQ ID NO: 92.

29. The monoclonal antibody of claim 1, wherein the monoclonal antibody comprises:
a) a heavy chain with three CDRs comprising the amino acid sequences GFSLSTSGVG (SEQ ID NO:754), IYWDDDK (SEQ ID NO:755), and ARISGSGYFYPFDI (SEQ ID NO:756) respectively, and/or a light chain with three CDRs comprising the amino acid sequences SGSIASNY (SEQ ID NO:802), EDN (SEQ ID NO:803), and QSYDSSNLWV (SEQ ID NO:804) respectively;
b) a heavy chain with three CDRs comprising the amino acid sequences GDSVSSNSAA (SEQ ID NO:757), TYYRSRWYN (SEQ ID NO:758), and AREIRGFDY (SEQ ID NO:759) respectively, and/or a light chain with three CDRs comprising the amino acid sequences SSDVGAYNF (SEQ ID NO:805), DFN (SEQ ID NO:806), and SSYAGSNNFDVV (SEQ ID NO:807) respectively;
c) a heavy chain with three CDRs comprising the amino acid sequences GFTFGDYA (SEQ ID NO:760), IRSKAYGGTT (SEQ ID NO:761), and TTADDDMDV (SEQ ID NO:762) respectively, and/or a light chain with three CDRs comprising the amino acid sequences SGTIASNY (SEQ ID NO:808), EDN (SEQ ID NO:809), and QSYDTSNHYV (SEQ ID NO:810) respectively;
d) a heavy chain with three CDRs comprising the amino acid sequences GFTFSNYG (SEQ ID NO:763), IWERGSKK (SEQ ID NO:764), and AREGISMTGAEYFQH (SEQ ID NO:765) respectively, and/or a light chain with three CDRs comprising the amino acid sequences SSNIGAGYD (SEQ ID NO:811), GTN (SEQ ID NO:812), and QSYDNSLTDPYV (SEQ ID NO:813) respectively;
e) a heavy chain with three CDRs comprising the amino acid sequences GFTFDDYA (SEQ ID NO:766), IDWNSGVI (SEQ ID NO:767), and AKDIGPGGSGSYYAFDI (SEQ ID NO:768) respectively, and/or a light chain with three CDRs comprising the amino acid sequences SSDVGGSKY (SEQ ID NO:814), DVT (SEQ ID NO:815), and AAWDDSLNGVV (SEQ ID NO:816) respectively;
f) a heavy chain with three CDRs comprising the amino acid sequences GFSFSRYG (SEQ ID NO:769), IRHDGSKK (SEQ ID NO:770), and AKDGRLEAALDD (SEQ ID NO:771) respectively, and/or a light chain with three CDRs comprising the amino acid sequences SGSIANNF (SEQ ID NO:817), EDN (SEQ ID NO:818), and QSYDSSNLV (SEQ ID NO:819) respectively;
g) a heavy chain with three CDRs comprising the amino acid sequences GYSFTSYW (SEQ ID NO:772), IYPGDSDT (SEQ ID NO:773), and ARRGDLDAFDI (SEQ ID NO:774) respectively, and/or a light chain with three CDRs comprising the amino acid sequences SANIGSNA (SEQ ID NO:820), GNT (SEQ ID NO:821), and AAWDDSLNGYV (SEQ ID NO:822) respectively;
h) a heavy chain with three CDRs comprising the amino acid sequences GYRLSDYY (SEQ ID NO:775), IKQDGSEK (SEQ ID NO:776), and ARVRGWSRGYFDY (SEQ ID NO:777) respectively, and/or a light chain with three CDRs comprising the amino acid sequences SGSIASNY (SEQ ID NO:823), EDN (SEQ ID NO:824), and QSYDSSNHWV (SEQ ID NO:825) respectively;
i) a heavy chain with three CDRs comprising the amino acid sequences GFTFDDYA (SEQ ID NO:778), ISWNSGSI (SEQ ID NO:779), and ARDWWGSIDH (SEQ ID NO:780) respectively, and/or a light chain with three CDRs comprising the amino acid sequences SSDVGGYDY (SEQ ID NO:826), DVS (SEQ ID NO:827), and SSYTSSSPVV (SEQ ID NO:828) respectively;
j) a heavy chain with three CDRs comprising the amino acid sequences GFTFSHYD (SEQ ID NO:781), IGYDGTNL (SEQ ID NO:782), and ARAANYYDSSGYGRADAF (SEQ ID NO:783) respectively, and/or a light chain with three CDRs comprising the amino acid sequences TGSIAGNY (SEQ ID NO:829), DDN (SEQ ID NO:830), and QSYDSGNRGV (SEQ ID NO:831) respectively;
k) a heavy chain with three CDRs comprising the amino acid sequences GGTFSTYG (SEQ ID NO:784), IIPSLGIP (SEQ ID NO:785), and ARENIDLATNDF (SEQ ID NO:786) respectively, and/or a light chain with three CDRs comprising the amino acid sequences SRDIGAYGY (SEQ ID NO:832), EVR (SEQ ID NO:833), and SSYTSSSTLDVV (SEQ ID NO:834) respectively;
l) a heavy chain with three CDRs comprising the amino acid sequences GGTFSSSG (SEQ ID NO:787), IIPMLGTP (SEQ ID NO:788), and ARDGGNYDY (SEQ ID NO:789) respectively, and/or a light chain with three CDRs comprising the amino acid sequences SSNIGRNA (SEQ ID NO:835), SNN (SEQ ID NO:836), and SAWDTSLSTWV (SEQ ID NO:837) respectively;
m) a heavy chain with three CDRs comprising the amino acid sequences GFTFSSYW (SEQ ID NO:790), IKQDGSEK (SEQ ID NO:791), and ARGFYYYGAFDI (SEQ ID NO:792) respectively, and/or a light chain with three CDRs comprising the amino acid sequences SGSIASNY (SEQ ID NO:838), EDN (SEQ ID NO:839), and QSYDSSNHWV (SEQ ID NO:840) respectively;
n) a heavy chain with three CDRs comprising the amino acid sequences GFTFDDYA (SEQ ID NO:793), IDWNSGVI (SEQ ID NO:794), and AKDAYSYGFLGAFDI (SEQ ID NO:795) respectively, and/or a light chain with three CDRs comprising the amino acid sequences NIRTKG (SEQ ID NO:841), YAS (SEQ ID NO:842), and QVWDSSSDLVV (SEQ ID NO:843) respectively;
o) a heavy chain with three CDRs comprising the amino acid sequences GYSFTGSH (SEQ ID NO:796), INPDSGVI (SEQ ID NO:797), and ARDKAIGYVWALDY (SEQ ID NO:798) respectively, and/or a light chain with three CDRs comprising the amino acid sequences SSDVGTYNR (SEQ ID NO:844), EVS (SEQ ID NO:845), and SSYTRTFTYV (SEQ ID NO:846) respectively; or
p) a heavy chain with three CDRs comprising the amino acid sequences GASISNSF (SEQ ID NO:799), TSYSGNS (SEQ ID NO:800), and ARREWIKGHFDY (SEQ ID NO:801) respectively, and/or a light chain with three CDRs comprising the amino acid sequences GGSIASNY (SEQ ID NO:847), EDN (SEQ ID NO:848), and QSYDSSNPVV (SEQ ID NO:849) respectively.

30. The monoclonal antibody of claim 1, wherein the monoclonal antibody comprises:
a) a V_{H} amino acid sequence having SEQ ID NO: 722, and a V_{L} amino acid sequence having SEQ ID NO: 723;
b) a V_{H} amino acid sequence having SEQ ID NO: 724, and a V_{L} amino acid sequence having SEQ ID NO: 725;
c) a V_{H} amino acid sequence having SEQ ID NO: 726, and a V_{L} amino acid sequence having SEQ ID NO: 727;
d) a V_{H} amino acid sequence having SEQ ID NO: 728, and a V_{L} amino acid sequence having SEQ ID NO: 729;
e) a V_{H} amino acid sequence having SEQ ID NO: 730, and a V_{L} amino acid sequence having SEQ ID NO: 731;
f) a V_{H} amino acid sequence having SEQ ID NO: 732, and a V_{L} amino acid sequence having SEQ ID NO: 733;
g) a V_{H} amino acid sequence having SEQ ID NO: 734, and a V_{L} amino acid sequence having SEQ ID NO: 735;
h) a V_{H} amino acid sequence having SEQ ID NO: 736, and a V_{L} amino acid sequence having SEQ ID NO: 737;
i) a V_{H} amino acid sequence having SEQ ID NO: 738, and a V_{L} amino acid sequence having SEQ ID NO: 739;
j) a V_{H} amino acid sequence having SEQ ID NO: 740, and a V_{L} amino acid sequence having SEQ ID NO: 741;
k) a V_{H} amino acid sequence having SEQ ID NO: 742, and a V_{L} amino acid sequence having SEQ ID NO: 743;
l) a V_{H} amino acid sequence having SEQ ID NO: 744, and a V_{L} amino acid sequence having SEQ ID NO: 745;
m) a V_{H} amino acid sequence having SEQ ID NO: 746, and a V_{L} amino acid sequence having SEQ ID NO: 747;
n) a V_{H} amino acid sequence having SEQ ID NO: 748, and a V_{L} amino acid sequence having SEQ ID NO: 749;
o) a V_{H} amino acid sequence having SEQ ID NO: 750, and a V_{L} amino acid sequence having SEQ ID NO: 751; or
p) a V_{H} amino acid sequence having SEQ ID NO: 752, and a V_{L} amino acid sequence having SEQ ID NO: 753.

31. The antibody of claim 15, wherein the antibody comprises:
a) a heavy chain with three CDRs comprising the amino acid sequences GFSLSTSGVG (SEQ ID NO:754), IYWDDDK (SEQ ID NO:755), and ARISGSGYFYPFDI (SEQ ID NO:756) respectively, and/or a light chain with three CDRs comprising the amino acid sequences SGSIASNY (SEQ ID NO:802), EDN (SEQ ID NO:803), and QSYDSSNLWV (SEQ ID NO:804) respectively;
b) a heavy chain with three CDRs comprising the amino acid sequences GDSVSSNSAA (SEQ ID NO:757), TYYRSRWYN (SEQ ID NO:758), and AREIRGFDY (SEQ ID NO:759) respectively, and/or a light chain with three CDRs comprising the amino acid sequences SSDVGAYNF (SEQ ID NO:805), DFN (SEQ ID NO:806), and SSYAGSNNFDVV (SEQ ID NO:807) respectively;
c) a heavy chain with three CDRs comprising the amino acid sequences GFTFGDYA (SEQ ID NO:760), IRSKAYGGTT (SEQ ID NO:761), and TTADDDMDV (SEQ ID NO:762) respectively, and/or a light chain with three CDRs comprising the amino acid sequences SGTIASNY (SEQ ID NO:808), EDN (SEQ ID NO:809), and QSYDTSNHYV (SEQ ID NO:810) respectively;
d) a heavy chain with three CDRs comprising the amino acid sequences GFTFSNYG (SEQ ID NO:763), IWERGSKK (SEQ ID NO:764), and AREGISMTGAEYFQH (SEQ ID NO:765) respectively, and/or a light chain with three CDRs comprising the amino acid sequences SSNIGAGYD (SEQ ID NO:811), GTN (SEQ ID NO:812), and QSYDNSLTDPYV (SEQ ID NO:813) respectively;
e) a heavy chain with three CDRs comprising the amino acid sequences GFTFDDYA (SEQ ID NO:766), IDWNSGVI (SEQ ID NO:767), and AKDIGPGGSGSYYAFDI (SEQ ID NO:768) respectively, and/or a light chain with three CDRs comprising the amino acid sequences SSDVGGSKY (SEQ ID NO:814), DVT (SEQ ID NO:815), and AAWDDSLNGVV (SEQ ID NO:816) respectively;
f) a heavy chain with three CDRs comprising the amino acid sequences GFSFSRYG (SEQ ID NO:769), IRHDGSKK (SEQ ID NO:770), and AKDGRLEAALDD (SEQ ID NO:771) respectively, and/or a light chain with three CDRs comprising the amino acid sequences SGSIANNF (SEQ ID NO:817), EDN (SEQ ID NO:818), and QSYDSSNLV (SEQ ID NO:819) respectively;
g) a heavy chain with three CDRs comprising the amino acid sequences GYSFTSYW (SEQ ID NO:772), IYPGDSDT (SEQ ID NO:773), and ARRGDLDAFDI (SEQ ID NO:774) respectively, and/or a light chain with three CDRs comprising the amino acid sequences SANIGSNA (SEQ ID NO:820), GNT (SEQ ID NO:821), and AAWDDSLNGYV (SEQ ID NO:822) respectively;
h) a heavy chain with three CDRs comprising the amino acid sequences GYRLSDYY (SEQ ID NO:775), IKQDGSEK (SEQ ID NO:776), and ARVRGWSRGYFDY (SEQ ID NO:777) respectively, and/or a light chain with three CDRs comprising the amino acid sequences SGSIASNY (SEQ ID NO:823), EDN (SEQ ID NO:824), and QSYDSSNHWV (SEQ ID NO:825) respectively;
i) a heavy chain with three CDRs comprising the amino acid sequences GFTFDDYA (SEQ ID NO:778), ISWNSGSI (SEQ ID NO:779), and ARDWWGSIDH (SEQ ID NO:780) respectively, and/or a light chain with three CDRs comprising the amino acid sequences SSDVGGYDY (SEQ ID NO:826), DVS (SEQ ID NO:827), and SSYTSSSPVV (SEQ ID NO:828) respectively;
j) a heavy chain with three CDRs comprising the amino acid sequences GFTFSHYD (SEQ ID NO:781), IGYDGTNL (SEQ ID NO:782), and ARAANYYDSSGYGRADAF (SEQ ID NO:783) respectively, and/or a light chain with three CDRs comprising the amino acid sequences TGSIAGNY (SEQ ID NO:829), DDN (SEQ ID NO:830), and QSYDSGNRGV (SEQ ID NO:831) respectively;
k) a heavy chain with three CDRs comprising the amino acid sequences GGTFSTYG (SEQ ID NO:784), IIPSLGIP (SEQ ID NO:785), and ARENIDLATNDF (SEQ ID NO:786) respectively, and/or a light chain with three CDRs comprising the amino acid sequences SRDIGAYGY (SEQ ID NO:832), EVR (SEQ ID NO:833), and SSYTSSSTLDVV (SEQ ID NO:834) respectively;
l) a heavy chain with three CDRs comprising the amino acid sequences GGTFSSSG (SEQ ID NO:787), IIPMLGTP (SEQ ID NO:788), and ARDGGNYDY (SEQ ID NO:789) respectively, and/or a light chain with three CDRs comprising the amino acid sequences SSNIGRNA (SEQ ID NO:835), SNN (SEQ ID NO:836), and SAWDTSLSTWV (SEQ ID NO:837) respectively;
m) a heavy chain with three CDRs comprising the amino acid sequences GFTFSSYW (SEQ ID NO:790), IKQDGSEK (SEQ ID NO:791), and ARGFYYYGAFDI (SEQ ID NO:792) respectively, and/or a light chain with three CDRs comprising the amino acid sequences SGSIASNY (SEQ ID NO:838), EDN (SEQ ID NO:839), and QSYDSSNHWV (SEQ ID NO:840) respectively;
n) a heavy chain with three CDRs comprising the amino acid sequences GFTFDDYA (SEQ ID NO:793), IDWNSGVI (SEQ ID NO:794), and AKDAYSYGFLGAFDI (SEQ ID NO:795) respectively, and/or a light chain with three CDRs comprising the amino acid sequences NIRTKG (SEQ ID NO:841), YAS (SEQ ID NO:842), and QVWDSSSDLVV (SEQ ID NO:843) respectively;
o) a heavy chain with three CDRs comprising the amino acid sequences GYSFTGSH (SEQ ID NO:796), INPDSGVI (SEQ ID NO:797), and ARDKAIGYVWALDY (SEQ ID NO:798) respectively, and/or a light chain with three CDRs comprising the amino acid sequences SSDVGTYNR (SEQ ID NO:844), EVS (SEQ ID NO:845), and SSYTRTFTYV (SEQ ID NO:846) respectively; or
p) a heavy chain with three CDRs comprising the amino acid sequences GASISNSF (SEQ ID NO:799), TSYSGNS (SEQ ID NO:800), and ARREWIKGHFDY (SEQ ID NO:801) respectively, and/or a light chain with three CDRs comprising the amino acid sequences GGSIASNY (SEQ ID NO:847), EDN (SEQ ID NO:848), and QSYDSSNPVV (SEQ ID NO:849) respectively.

32. The monoclonal antibody of claim 1, wherein the monoclonal antibody comprises:
a) a V_{H} amino acid sequence having SEQ ID NO: 722, and a V_{L} amino acid sequence having SEQ ID NO: 723;
b) a V_{H} amino acid sequence having SEQ ID NO: 724, and a V_{L} amino acid sequence having SEQ ID NO: 725;
c) a V_{H} amino acid sequence having SEQ ID NO: 726, and a V_{L} amino acid sequence having SEQ ID NO: 727;
d) a V_{H} amino acid sequence having SEQ ID NO: 728, and a V_{L} amino acid sequence having SEQ ID NO: 729;
e) a V_{H} amino acid sequence having SEQ ID NO: 730, and a V_{L} amino acid sequence having SEQ ID NO: 731;
f) a V_{H} amino acid sequence having SEQ ID NO: 732, and a V_{L} amino acid sequence having SEQ ID NO: 733;
g) a V_{H} amino acid sequence having SEQ ID NO: 734, and a V_{L} amino acid sequence having SEQ ID NO: 735;
h) a V_{H} amino acid sequence having SEQ ID NO: 736, and a V_{L} amino acid sequence having SEQ ID NO: 737;
i) a V_{H} amino acid sequence having SEQ ID NO: 738, and a V_{L} amino acid sequence having SEQ ID NO: 739;
j) a V_{H} amino acid sequence having SEQ ID NO: 740, and a V_{L} amino acid sequence having SEQ ID NO: 741;
k) a V_{H} amino acid sequence having SEQ ID NO: 742, and a V_{L} amino acid sequence having SEQ ID NO: 743;
l) a V_{H} amino acid sequence having SEQ ID NO: 744, and a V_{L} amino acid sequence having SEQ ID NO: 745;
m) a V_{H} amino acid sequence having SEQ ID NO: 746, and a V_{L} amino acid sequence having SEQ ID NO: 747;
n) a V_{H} amino acid sequence having SEQ ID NO: 748, and a V_{L} amino acid sequence having SEQ ID NO: 749;
o) a V_{H} amino acid sequence having SEQ ID NO: 750, and a V_{L} amino acid sequence having SEQ ID NO: 751; or
p) a V_{H} amino acid sequence having SEQ ID NO: 752, and a V_{L} amino acid sequence having SEQ ID NO: 753.

33. A method of preventing a disease or disorder caused by Severe Acute Respiratory Syndrome coronavirus (SARS-CoV2), the method comprising administering to a subject at risk of suffering from the disease or disorder, a therapeutically effective amount of the monoclonal antibody of claim 1 or the scFv antibody of claim 15.

34. The method of claim 33, wherein the method further comprises administering an anti-viral drug, a viral entry inhibitor, a viral attachment inhibitor, or a combination thereof.

35. The method of claim 33, wherein the method comprises administering two or more antibodies specific to SARS-CoV2.

36. The method of claim 33, wherein the antibody is administered prior to or after exposure to SARS-CoV2.

37. The method of claim 33, wherein the antibody is administered at a dose sufficient to neutralize the SARS-CoV2.

38. A method of delaying the onset of one or more symptoms of a SARS-CoV2 infection, the method comprising administering to a subject at risk of suffering from the infection, a therapeutically effective amount of the monoclonal antibody of claim 1 or the scFv antibody of claim 15.

39. A composition comprising the monoclonal antibody of claim 1 or the scFv antibody of claim 15 and a carrier.

40. A method of detecting the presence of SARS-CoV2 in a sample, the method comprising:
a) contacting the sample with the monoclonal antibody of claim 1 or the scFv antibody of claim 15; and
b) detecting the presence or absence of an antibody-antigen complex, thereby detecting the presence of SARS-CoV2 in a sample.

41. The method of claim 40, wherein the detecting occurs in vivo.

42. The method of claim 40, wherein the sample is obtained from blood, hair, cheek scraping, saliva, biopsy, or semen.

43. The monoclonal antibody of claim 1, wherein the monoclonal antibody blocks the binding of SARS-CoV2 spike protein to angiotensin converting enzyme 2 (ACE2) cell surface receptor.

44. The monoclonal antibody of claim 1, wherein the monoclonal antibody comprises a heavy chain and/or light chain listed in any one of Table 65 to Table 126.

45. The monoclonal antibody of claim 1, wherein the monoclonal antibody comprises a heavy chain with three CDRs comprising any one of the amino acid sequences described in Table 63, and/or a light chain with three CDRs comprising any one of the amino acid sequences described in Table 63.

46. The antibody of claim 15, wherein the antibody comprises a heavy chain and/or light chain listed in any one of Table 65 to Table 126.

47. The antibody of claim 15, wherein the antibody comprises a heavy chain with three CDRs comprising any one of the amino acid sequences described in Table 63, and/or a light chain with three CDRs comprising any one of the amino acid sequences described in Table 63.

The application's sequence listing, which the Patent Office published only in electronic form, follows.

SEQUENCE LISTING (2785 sequences)

SEQ ID NO: 1 - protein, 115 aa, Artificial Sequence
  Description of Artificial Sequence: Synthetic polypeptide
EVQLVESGPGVVSPSATLFLTCSVSGGSIRTHSWNWIRQPPGKPLEWIGFIHHSGATNKNPSLKSRVTISSDTSKNEFSLTLTSVTAADTAVYYCARGPGILSYWSRGTLVTVSS

SEQ ID NO: 2 - protein, 111 aa, Artificial Sequence
  Description of Artificial Sequence: Synthetic polypeptide
LPVLTQPPSASGTPGQRVTISCSGSSSNIGSNTVNWYQQLPGTAPKLLIYSNNQRPSGVPDRFSGSKSGTSASLAISGLQSEDEADYYCAAWDDSLNVHYVFGSGTKVTVL

SEQ ID NO: 3 - protein, 117 aa, Artificial Sequence
  Description of Artificial Sequence: Synthetic polypeptide
EVQLVESGPGLVKPSETLSLTCTVSGGSISSYYWSWIRQPAGKGLEWIGRIYTSGSTNYNPSLKSRVTMSVDTSKNQFSLKLSSVTAADTAVYYCARDVGFGWFDRWGQGTLVTVSS

SEQ ID NO: 4 - protein, 111 aa, Artificial Sequence
  Description of Artificial Sequence: Synthetic polypeptide
NFMLTQPHSVSESPGKTVTISCTRSSGSIASNYVQWYQQRPGSSPTTVIYEDNQRPSGVPDRFSGSIDSSSNSASLTISGLTTEDEADYYCQSFDSASLWVFGGGTKLTVL

SEQ ID NO: 5 - protein, 115 aa, Artificial Sequence
  Description of Artificial Sequence: Synthetic polypeptide
EVQLVESGPGLVKPSATLFLTCSVSGGSIRTHSWNWIRQPPGKPLEWIGFIHHSGATNKNPSLKSRVSISSDPSKNEFSLTLTSVTAADTAVYYCARGPGILSYWSRGTLVTVSS

SEQ ID NO: 6 - protein, 110 aa, Artificial Sequence
  Description of Artificial Sequence: Synthetic polypeptide
QPGLTQPPSASGTPGQRVTISCSGSSSNIGSNDVTWYQQLPGTAPKLLIYSNNQRPSGVPDRFSASRSGTSASLAITGLQAEDEADYYCATWDDSLSAGVFGGGTKLTVL

SEQ ID NO: 7 - protein, 129 aa, Artificial Sequence
  Description of Artificial Sequence: Synthetic polypeptide
QVQLQQSGPGLVKPSQTLSLTCAISGDSVSSYSDAWNWIRQSPSRGLEWLGRTYYRSKWYNDYAVSVKSRITINPDTSKNQFSLQLSSVTPEDTAVYYCAREIVATTPFRNYYYGMDVWGQGTTVTVSS

SEQ ID NO: 8 - protein, 111 aa, Artificial Sequence
  Description of Artificial Sequence: Synthetic polypeptide
NFMLTQPHSVSESPGNTVTISCTRTSGSIASNYVQWYQQRPGSSPTTVIFQDKLRPSGVPDRFSGSIDSSSNSASLTISGLKTEDEADYYCQSYDSSSLWVFGGGTKLTVL

SEQ ID NO: 9 - protein, 127 aa, Artificial Sequence
  Description of Artificial Sequence: Synthetic polypeptide
QVQLVQSGGGVVQPGRSLRLSCAASGFTFSHYDMHWVRQAPGKGLEWLAVIGYDGTNLYYADSVKGRFTISRDKSKNTLYLQINSLRAEDTAVYYCARAANYYDSSGYGRADAFDIWGQGTTVTVSS

SEQ ID NO: 10 - protein, 111 aa, Artificial Sequence
  Description of Artificial Sequence: Synthetic polypeptide
NFMLTQPHSVSESPGKTVIISCTRTTGSIAGNYVQWYRQRPGSAPTTVIYDDNQRPAGVPDRFSGSVDSSSNSASLTITGLKTEDEADYYCQSYDSGNRGVFGTGTKLTVL

SEQ ID NO: 11 - protein, 116 aa, Artificial Sequence
  Description of Artificial Sequence: Synthetic polypeptide
QVQLVQSGGGVVQPGKSLRLSCTASGFTFSDFPIHWVRQAPGKGLEWVGVISYDGNIKYYGDSVKGRFTISRDNAKNSLYLQMNSLRVEDTAVYYCARGGSSFDIWGQGTTVTVSS

SEQ ID NO: 12 - protein, 111 aa, Artificial Sequence
  Description of Artificial Sequence: Synthetic polypeptide
SYELTQPPSVSEAPRQRVTISCSGSTSNIGNNAVSWYQHLPGKAPKLLIYYNERLPSGVSDRFSGSKSGTSASLAISGLRSEDEADYYCAAWDDSLSGHVVFGGGTKLTVL

SEQ ID NO: 13 - protein, 122 aa, Artificial Sequence
  Description of Artificial Sequence: Synthetic polypeptide
QVTLKESGPTRVKPTQTLTLTCTFSGFSLSTTGVGVGWIRQPPGKALEWLALIYWNDDKRYSPSLKSRLTITKDTSKNQVVLTMTNMDPVDTATYYCARISGSGYFYPFDIWGQGTTVTVSS

SEQ ID NO: 14 - protein, 111 aa, Artificial Sequence
  Description of Artificial Sequence: Synthetic polypeptide
NFMLTQPHSVSESPGKTVTISCTRSSGSIASNYVQWYQQRPGSSPTTVIYEDNQRPSGVPDRFSGSIDSSSNSASLTISGLKAEDEADYYCQSYDSSSLWVFGGGTKLTVL

SEQ ID NO: 15 - protein, 121 aa, Artificial Sequence
  Description of Artificial Sequence: Synthetic polypeptide
QVQLVQSGGGVVQPGRSLRLSCAASGFTFTTYGMHWVRQAPGKGLEWVAVISYDGSIKNYADFVEGRFTISRDNSKNTLYLQMNSLRPEDTGVYYCARVGDSSSYYGIDAWGQGTLVTVSS

SEQ ID NO: 16 - protein, 110 aa, Artificial Sequence
  Description of Artificial Sequence: Synthetic polypeptide
QPVLTQPPSASGTPGQRVTISCSGSSSNIGSNSVNWYQQLPGTAPKLLIYSNNQRPSGVPDRFSDSKSGTSASLAISGLQSEDEADYFCAAWDDSLTGYVFGTGTKVTVL

SEQ ID NO: 17 - protein, 118 aa, Artificial Sequence
  Description of Artificial Sequence: Synthetic polypeptide
QVQLVQSGGGLVQPGRSLRLSCAASGFTFSSHAMHWVRQAPGKGLEWVAAISYDGSYTPYADSVKGRFTISRDNAKNSLYLQMNSLRDEDTAVYYCARDWVNFGMDVWGQGTLVTVSS

SEQ ID NO: 18 - protein, 111 aa, Artificial Sequence
  Description of Artificial Sequence: Synthetic polypeptide
QSVLTQPPSASGSPGQSVTISCTGTSSDVGGYNYVSWYQQYPGKAPKLMIYEVSKRPSGVPDRFSGSKSGNTASLTVSGLRAEDEADYYCAAWDDSLSGPVFGGGTKLTVL

SEQ ID NO: 19 - protein, 122 aa, Artificial Sequence
  Description of Artificial Sequence: Synthetic polypeptide
QVQLVQSGAEVKKPGASVKFSCKASGYTFSDYYIHWVRQAPGQGLEWMGWIDPNSGGTNFAQRFQGRVTMTTDTSVSTAYMDLRRLRSDDTAVYYCARDRGRGGQAGAFDYWGQGTLVTVSS

SEQ ID NO: 20 - protein, 108 aa, Artificial Sequence
  Description of Artificial Sequence: Synthetic polypeptide
QPGLTQPPSVSVAPGKTARITCGGNKIGSKSVHWYQQKAGQAPVLVVYDDSDRPSEIPERFSGSNSGNTATLTISRAEVGDEADYYCHVWDSSSDQNVFGTGTKVTVL

SEQ ID NO: 21 - protein, 123 aa, Artificial Sequence
  Description of Artificial Sequence: Synthetic polypeptide
QVHLVQSGGGVVQPGRSLRLSCAASGFTFSSYAMHWVRQAPGKGLEWVALISYGGSNKYYAESVKGRFTISRDNSKNTLYLQMNSLRAEDTAVYYCAKVRGSGWYWGSAFDIWGQGTMVTVSS

SEQ ID NO: 22 - protein, 108 aa, Artificial Sequence
  Description of Artificial Sequence: Synthetic polypeptide
SSELTQDPAVSVVLGQAVRITCQGDSLRAYFAGWYQQKPGQAPVLVTYGQDKRPSGIPDRFSASTSGNTASLTITGAQADDEADYYCNSRDSGENHLIFGGGTKLTVL

SEQ ID NO: 23 - protein, 121 aa, Artificial Sequence
  Description of Artificial Sequence: Synthetic polypeptide
QVQLVQSGTEVKKPGASVKVSCKASGYSFTGSHLHWVRQAPGQGLEWMGWINPDSGVINYAQKFQGRVTLTRDTSISTAYMELSGLRSDDTAVYYCARDKAIGYVWALDYWGQGTLVTVSS

SEQ ID NO: 24 - protein, 110 aa, Artificial Sequence
  Description of Artificial Sequence: Synthetic polypeptide
QSALTQPPSVSGSPGQSVTISCTGTSSDVGTYNRVSWYQQPPGKAPKLMIYEVSNRPSGVSNRFSGSKSGNTASLTISGLQAEDEADYYCSSYTRTFTYVFGTGTKVTVL

SEQ ID NO: 25 - protein, 119 aa, Artificial Sequence
  Description of Artificial Sequence: Synthetic polypeptide
QVTLKESGPTLVKPTQTLTLTCTLSGVSLDTIGMRVSWIRQPPGKALEWLARIDWDDDKFYSTALKTRLTISKDTSKNQVVFTMTSMDPVDTATYYCARSGLLYDLDVWGRGTLVTVSS

SEQ ID NO: 26 - protein, 110 aa, Artificial Sequence
  Description of Artificial Sequence: Synthetic polypeptide
QSVVTQPPSVSGAPGQRVTISCTGSDSDIGANFVQWYQQLPGTAPKLLIWRNTNRPSGVPDRFSASKSGTSASLAITGLQAEDEADYFCQSYDSSLSAYVFGGGTKVTVL

SEQ ID NO: 27 - protein, 121 aa, Artificial Sequence
  Description of Artificial Sequence: Synthetic polypeptide
QVQLVQSGGGVVQPGRSLRLSCAASGFTFSDYPFHWVRQAPGKGLQWVAVTSYDGRIKLYADSVKGRFTISRDDSQNMLYLEMHSLRLEDTAVYYCARDPGWLRSVGMDVWGQGTTVTVSS

SEQ ID NO: 28 - protein, 112 aa, Artificial Sequence
  Description of Artificial Sequence: Synthetic polypeptide
NFMLTQPHSVSESPGKTVTISCTRSSGSIARNYVQWYQQRPGSSPTTVIYADRDRPSGVPDRFSGSIDSSSNSASLTISGLKPEDEADYYCQSYDSSNQAAVFGGGTQLTVL

SEQ ID NO: 29 - protein, 116 aa, Artificial Sequence
  Description of Artificial Sequence: Synthetic polypeptide
QVQLVQSGAEVKKPGESLKISCKGSGYSFTSYWIGWVRQMPGKGLEWMGIIYPGDSDTRYSPSFQGQVTISADKSISTAYLQWSSLKASDTAMYYCARGWQWHDYWGQGTLVTVSS

SEQ ID NO: 30 - protein, 108 aa, Artificial Sequence
  Description of Artificial Sequence: Synthetic polypeptide
QTVVTQEPAVSVALGQTVRITCQGDSLRSYYASWYQQKPGQAPVLVVYDKDKRPSGIPDRFSGSTSGNTASLTITGAQAEDEADYYCNSRDRSDNHVVFGGGTKLTVL

SEQ ID NO: 31 - protein, 120 aa, Artificial Sequence
  Description of Artificial Sequence: Synthetic polypeptide
QVQLQQSGPGLVKASQTLSLTCVISGDSVSSRSSAWSWIRQSPSRGLEWLARTYYRSNWNYDFAQSVRSRIVINPDTSKNHVYLQLRSVTPEDTAVYYCVRNMRPDFDLWGQGTLVTVSS

SEQ ID NO: 32 - protein, 106 aa, Artificial Sequence
  Description of Artificial Sequence: Synthetic polypeptide
EIVLTQSPATLSLSPGERATLSCRASQSVSNNLAWYQQRPGQAPRLLIYDATTRATAIPARFSGSGSGTEFTLTISRLEPEDFATYYCQQYDNLPVFGGGTKVEIN

SEQ ID NO: 33 - protein, 119 aa, Artificial Sequence
  Description of Artificial Sequence: Synthetic polypeptide
EVQLVQSGAEVKKPGSSVKVSCKTSGYTFTTSGISWVRQAPGQGLEWMGWISAYNGNTNYAQKLQGRVTMTTDTSTSTAYMELRSLRSDDTAVYYCARDFHLYYGMDVWGKGTLVTVSS

SEQ ID NO: 34 - protein, 112 aa, Artificial Sequence
  Description of Artificial Sequence: Synthetic polypeptide
QSALTQPPSASGSPGQSVTISCTGTSSDVGAYNYVSWYQQHPGKAPKLLIYDVTKRPPGVPDRFSGSKSGNTASLTVSGLQAEDEADYYCAVWDDGLNGRVVFGGGTKLTVL

SEQ ID NO: 35 - protein, 117 aa, Artificial Sequence
  Description of Artificial Sequence: Synthetic polypeptide
QVQLVQSGAEVKKPGSSVKVSCKASGGTFSSYAISWLRQAPGQGLEWMGWINPNSGGTNYAQKFQGRVTMTRDTSISTAYMELSRLRSDDTAVYYCARGSGGYYLGWGQGTLVTVSS

SEQ ID NO: 36 - protein, 110 aa, Artificial Sequence
  Description of Artificial Sequence: Synthetic polypeptide
QPGLTQPPSVSKGLRQTATLTCTGNSNNVGNQGAAWLQQHQGHPPKLLSYMNNNRPPGISERFSASRSGNTASLTITGLQPEDEADYYCSAWDSSLSRWVFGGGTKLSVL

SEQ ID NO: 37 - protein, 119 aa, Artificial Sequence
  Description of Artificial Sequence: Synthetic polypeptide
QVQLVQSGAEVKKPGSSVKVSCKASGGTFSSYTISWVRQAPGQGLEWMGGIIPILGTPNYAQKFQDRVAITADKSTSTAYMELSSLRSEDTAVYYCAVGSGWYSGFDYWGQGTLVTVSS

SEQ ID NO: 38 - protein, 111 aa, Artificial Sequence
  Description of Artificial Sequence: Synthetic polypeptide
NFMLTQPHSVSESPGKTVTISCTGSSGSIASNYVQWYQQRPGSAPTTVIYEDSQRPSGVPDRFSGSIDSSSNSASLTISGLKTEDEADYYCQSFHNSNPVIFGGGTKLTVL

SEQ ID NO: 39 - protein, 119 aa, Artificial Sequence
  Description of Artificial Sequence: Synthetic polypeptide
QVQLVQSGGGLVQPGGSLRLSCAASGFTFSSYWMSWVRQAPGKGLEWVANIKQDGSEKYYVDSVKGRFTISRDNAKNSLYLQMNSLRAEDTAVYYCARGFYYYGAFDIWGQGTTVTVSS

SEQ ID NO: 40 - protein, 111 aa, Artificial Sequence
  Description of Artificial Sequence: Synthetic polypeptide
NFMLTQPHSVSESPGKTVTISCTGSSGSIASNYVQWYQQRPGSAPTTVIYEDNQRPSGVPDRFSGSIGSSSNSASLTISGLKTEDEADYYCQSYDSSNHWVFGGGTKLTVL

SEQ ID NO: 41 - protein, 122 aa, Artificial Sequence
  Description of Artificial Sequence: Synthetic polypeptide
QVQLVQSGGGLVQPGRSLRLSCAASGFTFDDYAMHWVRQVPGKGLEWVSGIDWNSGVIGYADSVKGRFTISRDNAKNSLYLQMNSLRAEDTALYYCAKDAYSYGFLGAFDIWGQGTMVTVSS

SEQ ID NO: 42 - protein, 108 aa, Artificial Sequence
  Description of Artificial Sequence: Synthetic polypeptide
QPGLTQPPSVSVAPGQTARISCGGNNIGSKSVHWYQQKPGRAPVLVVYEDRGRPSGIPERFSGSNSGNTATLTVSRVEAGDEADYYCQVWDGDSDHYVFATGTKVSIL

SEQ ID NO: 43 - protein, 140 aa, Artificial Sequence
  Description of Artificial Sequence: Synthetic polypeptide
QVQLVQSGGGLVQPGRSLRLSCAASGFTFDDYAMHWVRQVPGKGLEWVSGIDWNSGVIGYADSVKGRFTISRDNVKNSLYLQMTSLRAEDTAVYFCARDILPSNFDGKKIIVFQPPAKRDLDNYYGMDVWGQGTTVTVSS

SEQ ID NO: 44 - protein, 110 aa, Artificial Sequence
  Description of Artificial Sequence: Synthetic polypeptide
QPGLTQPASVSGSPGQSVTISCTGTSSDVGGYNLVSWYQQHPGKAPKLMIYEGSKRPSGISNRFSGSKSGNTASLTISGLQAEDEADYFCSSYTITDVVVFGGGTKLTVL

SEQ ID NO: 45-46 - skipped (2 entries)

SEQ ID NO: 47 - protein, 117 aa, Artificial Sequence
  Description of Artificial Sequence: Synthetic polypeptide
EVQLVQSGAEVKKPGESLRISCKASGYSFTSNWIGWVRQMPGKGLEWMGSIFPGDSDTKYSPSFQGQVTISADRSISTAYLQWSGLKASDTAMYYCARESYNAYGSWGQGTLVTVSS

SEQ ID NO: 48 - protein, 110 aa, Artificial Sequence
  Description of Artificial Sequence: Synthetic polypeptide
QPGLTQPPSASGTPGQRVTISCSGSSSNIGSNPVNWYQQLPGTAPKLLIYSNNQRPSGVPDRFSGSKSGTSASLAISGLRSEDEADYYCAAWDDSLSGVVFGGGTKLTVL

SEQ ID NO: 49 - protein, 118 aa, Artificial Sequence
  Description of Artificial Sequence: Synthetic polypeptide
EVQLVQSGAEVKKPGASVKVSCKASGYTFTSYGISWVRQAPGQGLEWMGWISAYNGNTKYAQKLQGRVTMTTDTSTSTAYMELRSLRSDDTAVYYCARGFPQLGSDYWGQGTLVTVSS

SEQ ID NO: 50 - protein, 110 aa, Artificial Sequence
  Description of Artificial Sequence: Synthetic polypeptide
QPVLTQPHSVSESPGKTVTISCTRSSGSIASNYVQWYQQRPGSAPTTVIYEDNQRPSGVPDRFSGSIDSSSNSASLIISGLMTEDEADYYCQSYDSTNWVFGGGTKLTVL

SEQ ID NO: 51 - protein, 127 aa, Artificial Sequence
  Description of Artificial Sequence: Synthetic polypeptide
EVQLVQSGAEVEKPGSSVKVSCKASGGTFSSYAISWVRQAPGQGLEWMGWISGYNGNTRYAQKFQGRVTLTIDTSSSTAYMELSSLRSEDTAVYYCARQMKDSGNYWEYYYYGMDVWGQGTMVTVSS

SEQ ID NO: 52 - protein, 109 aa, Artificial Sequence
  Description of Artificial Sequence: Synthetic polypeptide
QPGLTQPPSVSVAPGQTATITCGGDNIGSESVHWYQQKAGQAPVLVVYEDRGRPSGIPERFSGSNSGNTATLTISRVEAGDEADYYCQVWNPSGSLQYVFGPGTRLSVL

SEQ ID NO: 53 - protein, 117 aa, Artificial Sequence
  Description of Artificial Sequence: Synthetic polypeptide
QVQLVQSGAEVKKPGASVKVSCKASGYTFTSYGISWVRQAPGQGLEWMGWISTYNGNTNYAQKLQGRVTMTTDTSTSTAYMEVRSLRSDDTAVYYCARDVFGHFDYWGQGTLVTVSS

SEQ ID NO: 54 - protein, 110 aa, Artificial Sequence
  Description of Artificial Sequence: Synthetic polypeptide
NFMLTQPHSVSESPGKTVLISCTRSSGNIATNYVQWYQQRPGSAPTTVIYEDNQRPSGVPDRFSGSIDSSSNSASLTISGLKTEDEADYYCKSYDDGNHVFGGGTKLTVL

SEQ ID NO: 55 - protein, 122 aa, Artificial Sequence
  Description of Artificial Sequence: Synthetic polypeptide
QVTLKESGPTLVKPTQTLTLTCTFSGFSLTTTGVSVGWIRQPPGKALEWLALIHWDDDKRYSPSLRSRLTITRDTSKNQVVLTVTDMDPADTGTYYCASFIMTVYAEYFEDWGQGTLVTVSS

SEQ ID NO: 56 - protein, 107 aa, Artificial Sequence
  Description of Artificial Sequence: Synthetic polypeptide
EIVLTQSPATLSVSPGERATLSCRASQSVSSNLPWYQQKPGQAPRLLMYDVSTRATGIPPRFSGSGSGTEFSLTISSLQSEDFAVYYCQQRGVWPLTFDGGTNVEIK

SEQ ID NO: 57 - protein, 129 aa, Artificial Sequence
  Description of Artificial Sequence: Synthetic polypeptide
QVTLKESGPALVKSTQTLTLTCTISGFSLSTSAMCVSWIRQSPGKALEWLALIDWDNDRYYTTSLKTRLTITKDTSKNQVVLTMTSMDPLDTATYYCAHSPYDSIWGSFRPSVYYFDYWGQGTLVTVSS

SEQ ID NO: 58 - protein, 110 aa, Artificial Sequence
  Description of Artificial Sequence: Synthetic polypeptide
NFMLTQPHSVSESPGKTITISCTRTSGSIVSSYVQWYQQRPGSFPITVIYEHNQRPSGVPYRFSGSIDRSSNSAALTISDLKTEDEADYYCQSYDSQNGVFGGGTKLTVL

SEQ ID NO: 59 - protein, 116 aa, Artificial Sequence
  Description of Artificial Sequence: Synthetic polypeptide
QVQLVQSGGGLVKPGGSLRLSCAASGFTFSDYYMTWFRQAPGKGLEWISYISSSSSDTKYADSVKGRFTISRDNAKNSLYLQMDSLRAEDTAVYYCAMPTREPAYWGQGTLVTVSS

SEQ ID NO: 60 - protein, 110 aa, Artificial Sequence
  Description of Artificial Sequence: Synthetic polypeptide
QSALTQPASVSGSPGQSITISCTGTSSDLGTYNYVSWYQQHPGKAPKLMIYDVFKRPSGVPDRFSGSKSGNTASLTISGLQAEDEADYYCSSYTSSSTYVFGTGTKVTVL

SEQ ID NO: 61 - protein, 120 aa, Artificial Sequence
  Description of Artificial Sequence: Synthetic polypeptide
QVQLVQSGGGVVQPGKSLRLSCAASGFAFSDFPVHWVRQAPGKGLEWVAVISYDGSLKYYADSVKGRFTLSRDNSKNTVYLQLSSLRREDTAVYYCAREGVSNSRPFDHWGHGTLVTVSS

SEQ ID NO: 62 - protein, 108 aa, Artificial Sequence
  Description of Artificial Sequence: Synthetic polypeptide
SYELTQPPSVSVAPGQTARITCGGDSIGTKSVHWYQQKSGQAPVLVVYDDDDRPSGIPERFSGSNSGNTATLTISRVEAGDEADYYCQVWESDDDDLVFGGGTKLTVL

SEQ ID NO: 63 - protein, 121 aa, Artificial Sequence
  Description of Artificial Sequence: Synthetic polypeptide
QVQLVQSGGGVVQPGRSLRLSCAASGFTFSSYAMHWVRQAPGKGLEYVSAISSNGGSTYYADSVKGRFTISRDNGKNSLYLQMSSLRAEDTAVYYCTRDLWSGSADSFDIWGQGTMVTVSS

SEQ ID NO: 64 - protein, 110 aa, Artificial Sequence
  Description of Artificial Sequence: Synthetic polypeptide
SSELTQDPAVSVALGQTVKITCQGDSLRRYYASWYQQKPGQAPVRVIYGKNNRPSGIPDRFSGSSSGNTASLTITGAQAEDEADYYCNSRDISDNQWQWIFGGGTKLAVL

SEQ ID NO: 65 - protein, 117 aa, Artificial Sequence
  Description of Artificial Sequence: Synthetic polypeptide
QVQLVQSGGGLVQPGGSLRLSCAASGFPFNAYYMSWVRQAPGKGLEWVANINQDGSEKYYVDSVKGRFTISRDNAKNSLYLQMNGLRAEDTAVYYCARLYWWGMDVWGQGTTVTVSS

SEQ ID NO: 66 - protein, 111 aa, Artificial Sequence
  Description of Artificial Sequence: Synthetic polypeptide
QSALTQPPSASGSPGQSLTISCTGTSSDVGGYKYVSWYQHHPDKAPKLLIYDVNNRPSGVSSRFSGSKSGNTASLTISGLQAEDEADYYCSSYTGRMNLYVFGTGTEVTPR

SEQ ID NO: 67 - protein, 122 aa, Artificial Sequence; identical to SEQ ID NO: 41
  Description of Artificial Sequence: Synthetic polypeptide

SEQ ID NO: 68 - protein, 108 aa, Artificial Sequence
  Description of Artificial Sequence: Synthetic polypeptide
LPVLTQPPSVSVAPGQTASITCGGDNIRTKGVHWYQQKPGQAPLLVIYYASDRPSGIPERFSGSSSGNTATLTISRVEAGDEADYYCQVWDSSSDLVVFGGGTTLTVL

SEQ ID NO: 69 - protein, 117 aa, Artificial Sequence
  Description of Artificial Sequence: Synthetic polypeptide
QVQLVQSGGGLVQPGGSLRLSCATSGFTFDDYAMHWVRQAPGKGLEWVSGISWNSGSIGYVDSVKGRFTISRDNRNNKVYLQMNNLRAEDTAVYYCARDWWGSIDHWGLGTLVTVSS

SEQ ID NO: 70 - protein, 110 aa, Artificial Sequence
  Description of Artificial Sequence: Synthetic polypeptide
QSALTQPRSVSGSPGQSVTISCTGTSSDVGGYDYVSWYQQHPGKAPKLIIYDVSKRPSGVPDRFSGSKSGNTASLTVSGLQAEDEADYYCSSYTSSSPVVFGGGTKLTVL

SEQ ID NO: 71 - protein, 121 aa, Artificial Sequence
  Description of Artificial Sequence: Synthetic polypeptide
EVQLVESGPGLVKPSGTLSLTCAVSGGSISSSNWWSWVRQPPGKGLEWIGEIYHSGSTNYNPSLKSRVTISVDTSKNQFSLKLSSVTAADTAVYYCARRGGTYHRGAFDIWGQGTMVTVSS

SEQ ID NO: 72 - protein, 110 aa, Artificial Sequence
  Description of Artificial Sequence: Synthetic polypeptide
QSVLTQPPSASGSPGQSVTISCTGTSRDVGSYDLVSWYQQHPGKAPKLMIYEGSRRPSGVSSRFSGSKSGNTASLTISGLQAEDEADYYCSSYTSSNSLVFGTGTKVTVL

SEQ ID NO: 73 - protein, 118 aa, Artificial Sequence
  Description of Artificial Sequence: Synthetic polypeptide
QVTLKESGPGLVNPSETLSLTCTVSGASISNSFWSWIRQSPGKGLEWIGYTSYSGNSIYNPSLKSRLTMSIDTSKNQLSLNLRSLTAADTAVYYCARREWIKGHFDYWGQGTLVTVSS

SEQ ID NO: 74 - protein, 111 aa, Artificial Sequence
  Description of Artificial Sequence: Synthetic polypeptide
NFMLTQPHSVSESPGKTVTISCTGSGGSIASNYVQWYQQRPGSAPTTVIYEDNQRPSGVPDRFSGSIDSSSNSASLTISGLKTEDEADYYCQSYDSSNPVVFGGGTKLTVL

SEQ ID NO: 75 - protein, 115 aa, Artificial Sequence
  Description of Artificial Sequence: Synthetic polypeptide
EVQLVESGPGLMKPSETLFLSCSVSGGSFTTHSWNWIRQTPGKPLEWMGIILPGGATNKNPPLLSRVSISSDPSNNEFSLTLTSVTAADTAVYYCARGPGILSYWSGGTLATVSS

SEQ ID NO: 76 - protein, 108 aa, Artificial Sequence
  Description of Artificial Sequence: Synthetic polypeptide
QPGLTQTPSPSGTPGQRVTISCSGSSSIGSNDVTWYQQLPGTAPKLLIYSNNQRPSGVPDRFSASRSGTSPSLAITGLQAEDEADYYCAWDDSLSAVVFGGGTKMTVL

SEQ ID NO: 77 - protein, 115 aa, Artificial Sequence
  Description of Artificial Sequence: Synthetic polypeptide
EVQLVESGPGLVSPSATLFLTCSVSGGSFRTHSWNWIRQAPGKPLEWMGVIHHSGATNKNPSLKSRVTISSETSDNKFSLTLTSVTAEDTAVYYCARGPGILSYWSRGTLGTVSS

SEQ ID NO: 78 - protein, 111 aa, Artificial Sequence
  Description of Artificial Sequence: Synthetic polypeptide
LPVLTQPPSASGTPGQRVTISCSGSSSNIGSNTVNWYHQLPRTAPKLLIYINNHRPSGVPDRFSGSQSGTSASLAITVIQSEDEADYYCAEWYDSLNVHYVFGSGTKVTVL

SEQ ID NO: 79 - protein, 115 aa, Artificial Sequence
  Description of Artificial Sequence: Synthetic polypeptide
EVQLVESGPGVVSPSATLFLTCSVSGGSIRTHSWNWIRQPPGKPLEWIGVIHHSGATNKNPSLKSRVTISSKTSDNKFSLTLTSVTAEDTAVYYCARGPGILSYWSRGTLGTVSS

SEQ ID NO: 80 - protein, 111 aa, Artificial Sequence
  Description of Artificial Sequence: Synthetic polypeptide
LPVLTQPPSASGTPGQRVTISCSGSSSNIGSNTVNWYHYLPRTAPKLLIYINNHRASRVPDRFSGSQSGTSASLAITVIQSEDEADYYCAECYDSLNDHYVFGSGTKVTVL

SEQ ID NO: 81 - protein, 115 aa, Artificial Sequence
  Description of Artificial Sequence: Synthetic polypeptide
EVQLVESGPGVVSPSATLFLTCSVSGGSIRTHSWNWIRQAPGKALEWIGFIHHSGATNNNPSLKSRVTISSDTSKNEFSLTLTSVTAADTAVYYCGRGPGILSYWSRGTLVTVSS

SEQ ID NO: 82 - protein, 111 aa, Artificial Sequence
  Description of Artificial Sequence: Synthetic polypeptide
LPVLTQPPSASGTPGQRVTISCSGSSSNIGSNTVNWYQQLPGTAPKLLIYSNNQRPSRVPDRFSGSKTGTSPSLAISVLQSEDEADYYCAAWDDSLNVHYVFGSGTKSPSY

SEQ ID NO: 83 - protein, 118 aa, Artificial Sequence
  Description of Artificial Sequence: Synthetic polypeptide
QVQLVQSGAEVKKPGESLKISCKGSGYSFTSYWIGWVRQMPGKGLEWMGIIYPGDSDTRYSPSFQGQVTISADKSISTAYLQWSSLKASDTAMYYCARQGDGGGYDYWGQGTMVTVSS

SEQ ID NO: 84 - protein, 109 aa, Artificial Sequence
  Description of Artificial Sequence: Synthetic polypeptide
QPVLTQPPSASGTPGQRVTISCSGSSSNIGSNPVNWYQQLPGTAPKLLIYNNNQRPSGVPDRFSGSKSGTSASLAISGLQSEDEADYYCAAWDDSLNGLFGGGTKLTVL

SEQ ID NO: 85 - protein, 118 aa, Artificial Sequence
  Description of Artificial Sequence: Synthetic polypeptide
QVQLVQSGAEVKKPGNSLKISCKGSRYSFSNYWIAWVRQMPGKGLEWLGSIYPYDSDTRYSPSLQGQVTISVDKSLSTAYLQWRSLKASDTAMYYCARQGSSQSFDIWGQGTTVTVSS

SEQ ID NO: 86 - protein, 108 aa, Artificial Sequence
  Description of Artificial Sequence: Synthetic polypeptide
SSELTQDPAVSVALGQTVRITCQGDSLRSYYASWYQQKPGQAPVLVIYGKNNRPSGIPDRFSGSSSGNTASLTITGAQAEDEADYYCNSRDSSGDVRVFGGGTKLTVL

SEQ ID NO: 87 - protein, 119 aa, Artificial Sequence
  Description of Artificial Sequence: Synthetic polypeptide
EVQLVQSGAEVKKPGESLKISCKGSGYSFTSYWIGWVRQMPGKGLEWMGIIYPGDSDTRYSPSFQGQVTISADKSISTAYLQWSSLKASDTAMYYCARRRGSAAAFDTWGQGTLVTVSS

SEQ ID NO: 88 - protein, 110 aa, Artificial Sequence
  Description of Artificial Sequence: Synthetic polypeptide
QPVLTQPPSASGTPGQRVTISCSGSSSNIGSNPVNWYQQLPGTAPKLLIYDNNQRYPGVPDRFSGSKSGTSASLAISGLRSEDEADYYCEAWDDSLSGPVFGGGTKLTVL

SEQ ID NO: 89 - protein, 119 aa, Artificial Sequence
  Description of Artificial Sequence: Synthetic polypeptide
QVQLVQSGVEVKKPGESLKISCKGSGYSFTSYWIGWVRQMPGKGLEWMGIIYPGDSDTRYSPSFQGQVTISADKSISTAYLQWSSLKASDTAMYYCARTTYSYGSFDYWGQGTLVTVSS

SEQ ID NO: 90 - protein, 110 aa, Artificial Sequence
  Description of Artificial Sequence: Synthetic polypeptide
QPGLTQPPSASGTPGQGVTISCSGSSSNIGGNSVHWYQQLPGTAPKLLIYRNNQRPSGVPDRFSGSKSGTSASLAISGLRSEDEADYYCAAWDDSLNGWVFGGGTKLTVL

SEQ ID NO: 91 - protein, 121 aa, Artificial Sequence
  Description of Artificial Sequence: Synthetic polypeptide
QVQLQQSGPGLVKPSQTLSLTCAIFGDSVTSNSAAWNWIRQSPSRGLEWLGRTYYSSKWYNDYAVSVKSRVTINADTSKNQLSLQLNSVTPEDTAVYYCARGWLRLSFDPWGQGTLVTVSS

SEQ ID NO: 92 - protein, 112 aa, Artificial Sequence
  Description of Artificial Sequence: Synthetic polypeptide
NFMLTQPHSVSESPGKTVTISCTGSSGSIASNYVQWLQQRLGSAPTTVIYEDNQRPSGVPDRFSGSIDSSSNSASLTISGLKTEDEADYYCQSYDPNNHGVVFGGGTKLTVL

SEQ ID NO: 93 - protein, 8 aa, Artificial Sequence
  Description of Artificial Sequence: Synthetic peptide
GGSIRTHS

SEQ ID NO: 94 - protein, 7 aa, Artificial Sequence
  Description of Artificial Sequence: Synthetic peptide
IHHSGAT

SEQ ID NO: 95 - protein, 9 aa, Artificial Sequence
  Description of Artificial Sequence: Synthetic peptide
ARGPGILSY

SEQ ID NO: 96 - protein, 8 aa, Artificial Sequence
  Description of Artificial Sequence: Synthetic peptide
GGSISSYY

SEQ ID NO: 97 - protein, 7 aa, Artificial Sequence
  Description of Artificial Sequence: Synthetic peptide
IYTSGST

SEQ ID NO: 98 - protein, 11 aa, Artificial Sequence
  Description of Artificial Sequence: Synthetic peptide
ARDVGFGWFDR

SEQ ID NO: 99 - protein, 8 aa, Artificial Sequence
  Description of Artificial Sequence: Synthetic peptide
GGSIRTHS

SEQ ID NO: 100 - protein, 7 aa, Artificial Sequence
  Description of Artificial Sequence: Synthetic peptide
IHHSGAT

SEQ ID NO: 101 - protein, 9 aa, Artificial Sequence
  Description of Artificial Sequence: Synthetic peptide
ARGPGILSY

SEQ ID NO: 102 - protein, 10 aa, Artificial Sequence
  Description of Artificial Sequence: Synthetic peptide
GDSVSSYSDA

SEQ ID NO: 103 - protein, 9 aa, Artificial Sequence
  Description of Artificial Sequence: Synthetic peptide
TYYRSKWYN

SEQ ID NO: 104 - protein, 19 aa, Artificial Sequence
  Description of Artificial Sequence: Synthetic peptide
AREIVATTPFRNYYYGMDV

SEQ ID NO: 105 - protein, 8 aa, Artificial Sequence
  Description of Artificial Sequence: Synthetic peptide
GFTFSHYD

SEQ ID NO: 106 - protein, 8 aa, Artificial Sequence
  Description of Artificial Sequence: Synthetic peptide
IGYDGTNL

SEQ ID NO: 107 - protein, 20 aa, Artificial Sequence
  Description of Artificial Sequence: Synthetic peptide
ARAANYYDSSGYGRADAFDI

SEQ ID NO: 108 - protein, 8 aa, Artificial Sequence
  Description of Artificial Sequence: Synthetic peptide
GFTFSDFP

SEQ ID NO: 109 - protein, 8 aa, Artificial Sequence
  Description of Artificial Sequence: Synthetic peptide
ISYDGNIK

SEQ ID NO: 110 - protein, 9 aa, Artificial Sequence
  Description of Artificial Sequence: Synthetic peptide
ARGGSSFDI

SEQ ID NO: 111 - protein, 10 aa, Artificial Sequence
  Description of Artificial Sequence: Synthetic peptide
GFSLSTTGVG

SEQ ID NO: 112 - protein, 7 aa, Artificial Sequence
  Description of Artificial Sequence: Synthetic peptide
IYWNDDK

SEQ ID NO: 113 - protein, 14 aa, Artificial Sequence
  Description of Artificial Sequence: Synthetic peptide
ARISGSGYFYPFDI

SEQ ID NO: 114 - protein, 8 aa, Artificial Sequence
  Description of Artificial Sequence: Synthetic peptide
GFTFTTYG

SEQ ID NO: 115 - protein, 8 aa, Artificial Sequence
  Description of Artificial Sequence: Synthetic peptide
ISYDGSIK

SEQ ID NO: 116 - protein, 14 aa, Artificial Sequence
  Description of Artificial Sequence: Synthetic peptide
ARVGDSSSYYGIDA

SEQ ID NO: 117 - protein, 8 aa, Artificial Sequence
  Description of Artificial Sequence: Synthetic peptide
GFTFSSHA

SEQ ID NO: 118 - protein, 8 aa, Artificial Sequence
  Description of Artificial Sequence: Synthetic peptide
ISYDGSYT

SEQ ID NO: 119 - protein, 11 aa, Artificial Sequence
  Description of Artificial Sequence: Synthetic peptide
ARDWVNFGMDV

SEQ ID NO: 120 - protein, 8 aa, Artificial Sequence
  Description of Artificial Sequence: Synthetic peptide
GYTFSDYY

SEQ ID NO: 121 - protein, 8 aa, Artificial Sequence
  Description of Artificial Sequence: Synthetic peptide
IDPNSGGT

SEQ ID NO: 122 - protein, 8 aa, Artificial Sequence
  Description of Artificial Sequence: Synthetic peptide
GFTFSSYA

SEQ ID NO: 123 - protein, 8 aa, Artificial Sequence
  Description of Artificial Sequence: Synthetic peptide
ISYGGSNK

SEQ ID NO: 124 - protein, 16 aa, Artificial Sequence
  Description of Artificial Sequence: Synthetic peptide
AKVRGSGWYWGSAFDI

SEQ ID NO: 125 - protein, 8 aa, Artificial Sequence
  Description of Artificial Sequence: Synthetic peptide
GYSFTGSH

SEQ ID NO: 126 - protein, 8 aa, Artificial Sequence
  Description of Artificial Sequence: Synthetic peptide
INPDSGVI

SEQ ID NO: 127 - protein, 14 aa, Artificial Sequence
  Description of Artificial Sequence: Synthetic peptide
ARDKAIGYVWALDY

SEQ ID NO: 128 - protein, 10 aa, Artificial Sequence
  Description of Artificial Sequence: Synthetic peptide
GVSLDTIGMR

SEQ ID NO: 129 - protein, 7 aa, Artificial Sequence
  Description of Artificial Sequence: Synthetic peptide
IDWDDDK

SEQ ID NO: 130 - protein, 11 aa, Artificial Sequence
  Description of Artificial Sequence: Synthetic peptide
ARSGLLYDLDV

SEQ ID NO: 131 - protein, 8 aa, Artificial Sequence
  Description of Artificial Sequence: Synthetic peptide
GFTFSDYP

SEQ ID NO: 132 - protein, 8 aa, Artificial Sequence
  Description of Artificial Sequence: Synthetic peptide
TSYDGRIK

SEQ ID NO: 133 - protein, 14 aa, Artificial Sequence
  Description of Artificial Sequence: Synthetic peptide
ARDPGWLRSVGMDV

SEQ ID NO: 134 - protein, 8 aa, Artificial Sequence
  Description of Artificial Sequence: Synthetic peptide
GYSFTSYW

SEQ ID NO: 135 - protein, 8 aa, Artificial Sequence
  Description of Artificial Sequence: Synthetic peptide
IYPGDSDT

SEQ ID NO: 136 - protein, 9 aa, Artificial Sequence
  Description of Artificial Sequence: Synthetic peptide
ARGWQWHDY

SEQ ID NO: 137 - protein, 10 aa, Artificial Sequence
  Description of Artificial Sequence: Synthetic peptide
GDSVSSRSSA

SEQ ID NO: 138 - protein, 9 aa, Artificial Sequence
  Description of Artificial Sequence: Synthetic peptide
TYYRSNWNY

SEQ ID NO: 139 - protein, 10 aa, Artificial Sequence
  Description of Artificial Sequence: Synthetic peptide
VRNMRPDFDL

SEQ ID NO: 140 - protein, 8 aa, Artificial Sequence
  Description of Artificial Sequence: Synthetic peptide
GYTFTTSG

SEQ ID NO: 141 - protein, 8 aa, Artificial Sequence
  Description of Artificial Sequence: Synthetic peptide
ISAYNGNT

SEQ ID NO: 142 - protein, 12 aa, Artificial Sequence
  Description of Artificial Sequence: Synthetic peptide
ARDFHLYYGMDV

SEQ ID NO: 143 - protein, 8 aa, Artificial Sequence
  Description of Artificial Sequence: Synthetic peptide
GGTFSSYA

SEQ ID NO: 144 - protein, 8 aa, Artificial Sequence
  Description of Artificial Sequence: Synthetic peptide
INPNSGGT

SEQ ID NO: 145 - protein, 10 aa, Artificial Sequence
  Description of Artificial Sequence: Synthetic peptide
ARGSGGYYLG

SEQ ID NO: 146 - protein, 8 aa, Artificial Sequence
  Description of Artificial Sequence: Synthetic peptide
GGTFSSYT

SEQ ID NO: 147 - protein, 8 aa, Artificial Sequence
  Description of Artificial Sequence: Synthetic peptide
IIPILGTP

SEQ ID NO: 148 - protein, 12 aa, Artificial Sequence
  Description of Artificial Sequence: Synthetic peptide
AVGSGWYSGFDY

SEQ ID NO: 149 - protein, 8 aa, Artificial Sequence
  Description of Artificial Sequence: Synthetic peptide
GFTFSSYW

SEQ ID NO: 150 - protein, 8 aa, Artificial Sequence
  Description of Artificial Sequence: Synthetic peptide
IKQDGSEK

SEQ ID NO: 151 - protein, 12 aa, Artificial Sequence
  Description of Artificial Sequence: Synthetic peptide
ARGFYYYGAFDI

SEQ ID NO: 152 - protein, 8 aa, Artificial Sequence
  Description of Artificial Sequence: Synthetic peptide
GFTFDDYA

SEQ ID NO: 153 - protein, 8 aa, Artificial Sequence
  Description of Artificial Sequence: Synthetic peptide
IDWNSGVI

SEQ ID NO: 154 - protein, 15 aa, Artificial Sequence
  Description of Artificial Sequence: Synthetic peptide
AKDAYSYGFLGAFDI

SEQ ID NO: 155 - protein, 8 aa, Artificial Sequence
  Description of Artificial Sequence: Synthetic peptide
GFTFDDYA

SEQ ID NO: 156 - protein, 8 aa, Artificial Sequence
  Description of Artificial Sequence: Synthetic peptide
IDWNSGVI

SEQ ID NO: 157 - protein, 33 aa, Artificial Sequence
  Description of Artificial Sequence: Synthetic polypeptide
ARDILPSNFDGKKIIVFQPPAKRDLDNYYGMDV

SEQ ID NO: 158 - protein, 8 aa, Artificial Sequence
  Description of Artificial Sequence: Synthetic peptide
GYSFTSNW

SEQ ID NO: 159 - protein, 8 aa, Artificial Sequence
  Description of Artificial Sequence: Synthetic peptide
IFPGDSDT

SEQ ID NO: 160 - protein, 10 aa, Artificial Sequence
  Description of Artificial Sequence: Synthetic peptide
ARESYNAYGS

SEQ ID NO: 161 - protein, 8 aa, Artificial Sequence
  Description of Artificial Sequence: Synthetic peptide
GYTFTSYG

SEQ ID NO: 162 - protein, 8 aa, Artificial Sequence
  Description of Artificial Sequence: Synthetic peptide
ISAYNGNT

SEQ ID NO: 163 - protein, 11 aa, Artificial Sequence
  Description of Artificial Sequence: Synthetic peptide
ARGFPQLGSDY

SEQ ID NO: 164 - protein, 8 aa, Artificial Sequence
  Description of Artificial Sequence: Synthetic peptide
GGTFSSYA

SEQ ID NO: 165 - protein, 8 aa, Artificial Sequence
  Description of Artificial Sequence: Synthetic peptide
ISGYNGNT

SEQ ID NO: 166 - protein, 20 aa, Artificial Sequence
  Description of Artificial Sequence: Synthetic peptide
ARQMKDSGNYWEYYYYGMDV

SEQ ID NO: 167 - protein, 8 aa, Artificial Sequence
  Description of Artificial Sequence: Synthetic peptide
GYTFTSYG

SEQ ID NO: 168 - protein, 8 aa, Artificial Sequence
  Description of Artificial Sequence: Synthetic peptide
ISTYNGNT

SEQ ID NO: 169 - protein, 10 aa, Artificial Sequence
  Description of Artificial Sequence: Synthetic peptide
ARDVFGHFDY

SEQ ID NO: 170 - protein, 10 aa, Artificial Sequence
  Description of Artificial Sequence: Synthetic peptide
GFSLTTTGVS

SEQ ID NO: 171 - protein, 7 aa, Artificial Sequence
  Description of Artificial Sequence: Synthetic peptide
IHWDDDK

SEQ ID NO: 172 - protein, 14 aa, Artificial Sequence
  Description of Artificial Sequence: Synthetic peptide
ASFIMTVYAEYFED

SEQ ID NO: 173 - protein, 10 aa, Artificial Sequence
  Description of Artificial Sequence: Synthetic peptide
GFSLSTSAMC

SEQ ID NO: 174 - protein, 7 aa, Artificial Sequence
  Description of Artificial Sequence: Synthetic peptide
IDWDNDR

SEQ ID NO: 175 - protein, 21 aa, Artificial Sequence
  Description of Artificial Sequence: Synthetic peptide
AHSPYDSIWGSFRPSVYYFDY

SEQ ID NO: 176 - protein, 8 aa, Artificial Sequence
  Description of Artificial Sequence: Synthetic peptide
GFTFSDYY

SEQ ID NO: 177 - protein, 8 aa, Artificial Sequence
  Description of Artificial Sequence: Synthetic peptide
ISSSSSDT

SEQ ID NO: 178 - protein, 9 aa, Artificial Sequence
  Description of Artificial Sequence: Synthetic peptide
AMPTREPAY

SEQ ID NO: 179 - protein, 8 aa, Artificial Sequence
  Description of Artificial Sequence: Synthetic peptide
GFAFSDFP

SEQ ID NO: 180 - protein, 8 aa, Artificial Sequence
  Description of Artificial Sequence: Synthetic peptide
ISYDGSLK

SEQ ID NO: 181 - protein, 13 aa, Artificial Sequence
  Description of Artificial Sequence: Synthetic peptide
AREGVSNSRPFDH

SEQ ID NO: 182 - protein, 8 aa, Artificial Sequence
  Description of Artificial Sequence: Synthetic peptide
GFTFSSYA

SEQ ID NO: 183 - protein, 8 aa, Artificial Sequence
  Description of Artificial Sequence: Synthetic peptide
ISSNGGST

SEQ ID NO: 184 - protein, 14 aa, Artificial Sequence
  Description of Artificial Sequence: Synthetic peptide
TRDLWSGSADSFDI

SEQ ID NO: 185 - protein, 8 aa, Artificial Sequence
  Description of Artificial Sequence: Synthetic peptide
GFPFNAYY

SEQ ID NO: 186 - protein, 8 aa, Artificial Sequence
  Description of Artificial Sequence: Synthetic peptide
INQDGSEK

SEQ ID NO: 187 - protein, 10 aa, Artificial Sequence
  Description of Artificial Sequence: Synthetic peptide
ARLYWWGMDV

SEQ ID NO: 188 - protein, 8 aa, Artificial Sequence
  Description of Artificial Sequence: Synthetic peptide
GFTFDDYA

SEQ ID NO: 189 - protein, 8 aa, Artificial Sequence
  Description of Artificial Sequence: Synthetic peptide
IDWNSGVI

SEQ ID NO: 190 - protein, 15 aa, Artificial Sequence
  Description of Artificial Sequence: Synthetic peptide
AKDAYSYGFLGAFDI

SEQ ID NO: 191 - protein, 8 aa, Artificial Sequence
  Description of Artificial Sequence: Synthetic peptide
GFTFDDYA

SEQ ID NO: 192 - protein, 8 aa, Artificial Sequence
  Description of Artificial Sequence: Synthetic peptide
ISWNSGSI

SEQ ID NO: 193 - protein, 10 aa, Artificial Sequence
  Description of Artificial Sequence: Synthetic peptide
ARDWWGSIDH

SEQ ID NO: 194 - protein, 9 aa, Artificial Sequence
  Description of Artificial Sequence: Synthetic peptide
GGSISSSNW

SEQ ID NO: 195 - protein, 7 aa, Artificial Sequence
  Description of Artificial Sequence: Synthetic peptide
IYHSGST

SEQ ID NO: 196 - protein, 14 aa, Artificial Sequence
  Description of Artificial Sequence: Synthetic peptide
ARRGGTYHRGAFDI

SEQ ID NO: 197 - protein, 8 aa, Artificial Sequence
  Description of Artificial Sequence: Synthetic peptide
GASISNSF

SEQ ID NO: 198 - protein, 7 aa, Artificial Sequence
  Description of Artificial Sequence: Synthetic peptide
TSYSGNS

SEQ ID NO: 199 - protein, 12 aa, Artificial Sequence
  Description of Artificial Sequence: Synthetic peptide
ARREWIKGHFDY

SEQ ID NO: 200 - protein, 8 aa, Artificial Sequence
  Description of Artificial Sequence: Synthetic peptide
GGSFTTHS

SEQ ID NO: 201 - protein, 7 aa, Artificial Sequence
  Description of Artificial Sequence: Synthetic peptide
ILPGGAT

SEQ ID NO: 202 - protein, 9 aa, Artificial Sequence
  Description of Artificial Sequence: Synthetic peptide
ARGPGILSY

SEQ ID NO: 203 - protein, 8 aa, Artificial Sequence
  Description of Artificial Sequence: Synthetic peptide
GGSFRTHS

SEQ ID NO: 204 - protein, 7 aa, Artificial Sequence
  Description of Artificial Sequence: Synthetic peptide
IHHSGAT

SEQ ID NO: 205 - protein, 9 aa, Artificial Sequence
  Description of Artificial Sequence: Synthetic peptide
ARGPGILSY

SEQ ID NO: 206 - protein, 8 aa, Artificial Sequence
  Description of Artificial Sequence: Synthetic peptide
GGSIRTHS

SEQ ID NO: 207 - protein, 7 aa, Artificial Sequence
  Description of Artificial Sequence: Synthetic peptide
IHHSGAT

SEQ ID NO: 208 - protein, 9 aa, Artificial Sequence
  Description of Artificial Sequence: Synthetic peptide
ARGPGILSY

SEQ ID NO: 209 - protein, 8 aa, Artificial Sequence
  Description of Artificial Sequence: Synthetic peptide
GGSIRTHS

SEQ ID NO: 210 - protein, 7 aa, Artificial Sequence
  Description of Artificial Sequence: Synthetic peptide
IHHSGAT

SEQ ID NO: 211 - protein, 9 aa, Artificial Sequence
  Description of Artificial Sequence: Synthetic peptide
GRGPGILSY

SEQ ID NO: 212 - protein, 8 aa, Artificial Sequence
  Description of Artificial Sequence: Synthetic peptide
GYSFTSYW

SEQ ID NO: 213 - protein, 8 aa, Artificial Sequence
  Description of Artificial Sequence: Synthetic peptide
IYPGDSDT

SEQ ID NO: 214 - protein, 11 aa, Artificial Sequence
  Description of Artificial Sequence: Synthetic peptide
ARQGDGGGYDY

SEQ ID NO: 215 - protein, 8 aa, Artificial Sequence
  Description of Artificial Sequence: Synthetic peptide
RYSFSNYW

SEQ ID NO: 216 - protein, 8 aa, Artificial Sequence
  Description of Artificial Sequence: Synthetic peptide
IYPYDSDT

SEQ ID NO: 217 - protein, 11 aa, Artificial Sequence
  Description of Artificial Sequence: Synthetic peptide
ARQGSSQSFDI

SEQ ID NO: 218 - protein, 8 aa, Artificial Sequence
  Description of Artificial Sequence: Synthetic peptide
GYSFTSYW

SEQ ID NO: 219 - protein, 8 aa, Artificial Sequence
  Description of Artificial Sequence: Synthetic peptide
IYPGDSDT

SEQ ID NO: 220 - protein, 12 aa, Artificial Sequence
  Description of Artificial Sequence: Synthetic peptide
ARRRGSAAAFDT

SEQ ID NO: 221 - protein, 8 aa, Artificial Sequence
  Description of Artificial Sequence: Synthetic peptide
GYSFTSYW

SEQ ID NO: 222 - protein, 8 aa, Artificial Sequence
  Description of Artificial Sequence: Synthetic peptide
IYPGDSDT

SEQ ID NO: 223 - protein, 12 aa, Artificial Sequence
  Description of Artificial Sequence: Synthetic peptide
ARTTYSYGSFDY

SEQ ID NO: 224 - protein, 10 aa, Artificial Sequence
  Description of Artificial Sequence: Synthetic peptide
GDSVTSNSAA

SEQ ID NO: 225 - protein, 9 aa, Artificial Sequence
  Description of Artificial Sequence: Synthetic peptide
TYYSSKWYN

SEQ ID NO: 226 - protein, 11 aa, Artificial Sequence
  Description of Artificial Sequence: Synthetic peptide
ARGWLRLSFDP

SEQ ID NO: 227 - protein, 8 aa, Artificial Sequence
  Description of Artificial Sequence: Synthetic peptide
SSNIGSNT

SEQ ID NO: 228 - protein, 3 aa, Artificial Sequence
  Description of Artificial Sequence: Synthetic peptide
SNN

SEQ ID NO: 229 - protein, 12 aa, Artificial Sequence
  Description of Artificial Sequence: Synthetic peptide
AAWDDSLNVHYV

SEQ ID NO: 230 - protein, 8 aa, Artificial Sequence
  Description of Artificial Sequence: Synthetic peptide
SGSIASNY

SEQ ID NO: 231 - protein, 3 aa, Artificial Sequence
  Description of Artificial Sequence: Synthetic peptide
EDN

SEQ ID NO: 232 - protein, 10 aa, Artificial Sequence
  Description of Artificial Sequence: Synthetic peptide
QSFDSASLWV

SEQ ID NO: 233 - protein, 8 aa, Artificial Sequence
  Description of Artificial Sequence: Synthetic peptide
SSNIGSND

SEQ ID NO: 234 - protein, 3 aa, Artificial Sequence
  Description of Artificial Sequence: Synthetic peptide
SNN

SEQ ID NO: 235 - protein, 11 aa, Artificial Sequence
  Description of Artificial Sequence: Synthetic peptide
ATWDDSLSAGV

SEQ ID NO: 236 - protein, 8 aa, Artificial Sequence
  Description of Artificial Sequence: Synthetic peptide
SGSIASNY

SEQ ID NO: 237 - protein, 3 aa, Artificial Sequence
  Description of Artificial Sequence: Synthetic peptide
QDK

SEQ ID NO: 238 - protein, 10 aa, Artificial Sequence
  Description of Artificial Sequence: Synthetic peptide
QSYDSSSLWV

SEQ ID NO: 239 - protein, 8 aa, Artificial Sequence
  Description of Artificial Sequence: Synthetic peptide
TGSIAGNY

SEQ ID NO: 240 - protein, 3 aa, Artificial Sequence
  Description of Artificial Sequence: Synthetic peptide
DDN

SEQ ID NO: 241 - protein, 10 aa, Artificial Sequence
  Description of Artificial Sequence: Synthetic peptide
QSYDSGNRGV

SEQ ID NO: 242 - protein, 8 aa, Artificial Sequence
  Description of Artificial Sequence: Synthetic peptide
TSNIGNNA

SEQ ID NO: 243 - protein, 3 aa, Artificial Sequence
  Description of Artificial Sequence: Synthetic peptide
YNE

SEQ ID NO: 244 - protein, 12 aa, Artificial Sequence
  Description of Artificial Sequence: Synthetic peptide
AAWDDSLSGHVV

SEQ ID NO: 245 - protein, 8 aa, Artificial Sequence
  Description of Artificial Sequence: Synthetic peptide
SGSIASNY

SEQ ID NO: 246 - protein, 3 aa, Artificial Sequence
  Description of Artificial Sequence: Synthetic peptide
EDN

SEQ ID NO: 247 - protein, 10 aa, Artificial Sequence
  Description of Artificial Sequence: Synthetic peptide
QSYDSSSLWV

SEQ ID NO: 248 - protein, 8 aa, Artificial Sequence
  Description of Artificial Sequence: Synthetic peptide
SSNIGSNS

SEQ ID NO: 249 - protein, 3 aa, Artificial Sequence
  Description of Artificial Sequence: Synthetic peptide
SNN

SEQ ID NO: 250 - protein, 11 aa, Artificial Sequence
  Description of Artificial Sequence: Synthetic peptide
AAWDDSLTGYV

SEQ ID NO: 251 - protein, 9 aa, Artificial Sequence
  Description of Artificial Sequence: Synthetic peptide
SSDVGGYNY

SEQ ID NO: 252 - protein, 3 aa, Artificial Sequence
  Description of Artificial Sequence: Synthetic peptide
EVS

SEQ ID NO: 253 - protein, 11 aa, Artificial Sequence
  Description of Artificial Sequence: Synthetic peptide
AAWDDSLSGPV

SEQ ID NO: 254 - protein, 6 aa, Artificial Sequence
  Description of Artificial Sequence: Synthetic peptide
KIGSKS

SEQ ID NO: 255 - protein, 3 aa, Artificial Sequence
  Description of Artificial Sequence: Synthetic peptide
DDS

SEQ ID NO: 256 - protein, 11 aa, Artificial Sequence
  Description of Artificial Sequence: Synthetic peptide
HVWDSSSDQNV

SEQ ID NO: 257 - protein, 6 aa, Artificial Sequence
  Description of Artificial Sequence: Synthetic peptide
SLRAYF

SEQ ID NO: 258 - protein, 3 aa, Artificial Sequence
  Description of Artificial Sequence: Synthetic peptide
GQD

SEQ ID NO: 259 - protein, 11 aa, Artificial Sequence
  Description of Artificial Sequence: Synthetic peptide
NSRDSGENHLI

SEQ ID NO: 260 - protein, 9 aa, Artificial Sequence
  Description of Artificial Sequence: Synthetic peptide
SSDVGTYNR

SEQ ID NO: 261 - protein, 3 aa, Artificial Sequence
  Description of Artificial Sequence: Synthetic peptide
EVS

SEQ ID NO: 262 - protein, 10 aa, Artificial Sequence
  Description of Artificial Sequence: Synthetic peptide
SSYTRTFTYV

SEQ ID NO: 263 - protein, 8 aa, Artificial Sequence
  Description of Artificial Sequence: Synthetic peptide
DSDIGANF

SEQ ID NO: 264 - protein, 3 aa, Artificial Sequence
  Description of Artificial Sequence: Synthetic peptide
RNT

SEQ ID NO: 265 - protein, 11 aa, Artificial Sequence
  Description of Artificial Sequence: Synthetic peptide
QSYDSSLSAYV

SEQ ID NO: 266 - protein, 8 aa, Artificial Sequence
  Description of Artificial Sequence: Synthetic peptide
SGSIARNY

SEQ ID NO: 267 - protein, 3 aa, Artificial Sequence
  Description of Artificial Sequence: Synthetic peptide
ADR

SEQ ID NO: 268 - protein, 11 aa, Artificial Sequence
  Description of Artificial Sequence: Synthetic peptide
QSYDSSNQAAV

SEQ ID NO: 269 - protein, 6 aa, Artificial Sequence
  Description of Artificial Sequence: Synthetic peptide
SLRSYY

SEQ ID NO: 270 - protein, 3 aa, Artificial Sequence
  Description of Artificial Sequence: Synthetic peptide
DKD

SEQ ID NO: 271 - protein, 11 aa, Artificial Sequence
  Description of Artificial Sequence: Synthetic peptide
NSRDRSDNHVV

SEQ ID NO: 272 - protein, 6 aa, Artificial Sequence
  Description of Artificial Sequence: Synthetic peptide
QSVSNN

SEQ ID NO: 273 - protein, 3 aa, Artificial Sequence
  Description of Artificial Sequence: Synthetic peptide
DAT

SEQ ID NO: 274 - protein, 8 aa, Artificial Sequence
  Description of Artificial Sequence: Synthetic peptide
QQYDNLPV

SEQ ID NO: 275 - protein, 9 aa, Artificial Sequence
  Description of Artificial Sequence: Synthetic peptide
SSDVGAYNY

SEQ ID NO: 276 - protein, 3 aa, Artificial Sequence
  Description of Artificial Sequence: Synthetic peptide
DVT

SEQ ID NO: 277 - protein, 12 aa, Artificial Sequence
  Description of Artificial Sequence: Synthetic peptide
AVWDDGLNGRVV

SEQ ID NO: 278 - protein, 8 aa, Artificial Sequence
  Description of Artificial Sequence: Synthetic peptide
SNNVGNQG

SEQ ID NO: 279 - protein, 3 aa, Artificial Sequence
  Description of Artificial Sequence: Synthetic peptide
MNN

SEQ ID NO: 280 - protein, 11 aa, Artificial Sequence
  Description of Artificial Sequence: Synthetic peptide
SAWDSSLSRWV

SEQ ID NO: 281 - protein, 8 aa, Artificial Sequence
  Description of Artificial Sequence: Synthetic peptide
SGSIASNY

SEQ ID NO: 282 - protein, 3 aa, Artificial Sequence
  Description of Artificial Sequence: Synthetic peptide
EDS

SEQ ID NO: 283 - protein, 10 aa, Artificial Sequence
  Description of Artificial Sequence: Synthetic peptide
QSFHNSNPVI

SEQ ID NO: 284 - protein, 8 aa, Artificial Sequence
  Description of Artificial Sequence: Synthetic peptide
SGSIASNY

SEQ ID NO: 285 - protein, 3 aa, Artificial Sequence
  Description of Artificial Sequence: Synthetic peptide
EDN

SEQ ID NO: 286 - protein, 10 aa, Artificial Sequence
  Description of Artificial Sequence: Synthetic peptide
QSYDSSNHWV

SEQ ID NO: 287 - protein, 6 aa, Artificial Sequence
  Description of Artificial Sequence: Synthetic peptide
NIGSKS

SEQ ID NO: 288 - protein, 3 aa, Artificial Sequence
  Description of Artificial Sequence: Synthetic peptide
EDR

SEQ ID NO: 289 - protein, 11 aa, Artificial Sequence
  Description of Artificial Sequence: Synthetic peptide
QVWDGDSDHYV

SEQ ID NO: 290 - protein, 9 aa, Artificial Sequence
  Description of Artificial Sequence: Synthetic peptide
SSDVGGYNL

SEQ ID NO: 291 - protein, 3 aa, Artificial Sequence
  Description of Artificial Sequence: Synthetic peptide
EGS

SEQ ID NO: 292 - protein, 10 aa, Artificial Sequence
  Description of Artificial Sequence: Synthetic peptide
SSYTITDVVV

SEQ ID NO: 293 - protein, 8 aa, Artificial Sequence
  Description of Artificial Sequence: Synthetic peptide
SSNIGSNP

SEQ ID NO: 294 - protein, 3 aa, Artificial Sequence
  Description of Artificial Sequence: Synthetic peptide
SNN

SEQ ID NO: 295 - protein, 11 aa, Artificial Sequence
  Description of Artificial Sequence: Synthetic peptide
AAWDDSLSGVV

SEQ ID NO: 296 - protein, 8 aa, Artificial Sequence
  Description of Artificial Sequence: Synthetic peptide
SGSIASNY

SEQ ID NO: 297 - protein, 3 aa, Artificial Sequence
  Description of Artificial Sequence: Synthetic peptide
EDN

SEQ ID NO: 298 - protein, 9 aa, Artificial Sequence
  Description of Artificial Sequence: Synthetic peptide
QSYDSTNWV

SEQ ID NO: 299 - protein, 6 aa, Artificial Sequence
  Description of Artificial Sequence: Synthetic peptide
NIGSES

SEQ ID NO: 300 - protein, 3 aa, Artificial Sequence
  Description of Artificial Sequence: Synthetic peptide
EDR

SEQ ID NO: 301 - protein, 12 aa, Artificial Sequence
  Description of Artificial Sequence: Synthetic peptide
QVWNPSGSLQYV

SEQ ID NO: 302 - protein, 8 aa, Artificial Sequence
  Description of Artificial Sequence: Synthetic peptide
SGNIATNY

SEQ ID NO: 303 - protein, 3 aa, Artificial Sequence
  Description of Artificial Sequence: Synthetic peptide
EDN

SEQ ID NO: 304 - protein, 9 aa, Artificial Sequence
  Description of Artificial Sequence: Synthetic peptide
KSYDDGNHV

SEQ ID NO: 305 - protein, 6 aa, Artificial Sequence
  Description of Artificial Sequence: Synthetic peptide
QSVSSN

SEQ ID NO: 306 - protein, 3 aa, Artificial Sequence
  Description of Artificial Sequence: Synthetic peptide
DVS

SEQ ID NO: 307 - protein, 9 aa, Artificial Sequence
  Description of Artificial Sequence: Synthetic peptide
QQRGVWPLT

SEQ ID NO: 308 - protein, 8 aa, Artificial Sequence
  Description of Artificial Sequence: Synthetic peptide
SGSIVSSY

SEQ ID NO: 309 - protein, 3 aa, Artificial Sequence
  Description of Artificial Sequence: Synthetic peptide
EHN

SEQ ID NO: 310 - protein, 9 aa, Artificial Sequence
  Description of Artificial Sequence: Synthetic peptide
QSYDSQNGV

SEQ ID NO: 311 - protein, 9 aa, Artificial Sequence
  Description of Artificial Sequence: Synthetic peptide
SSDLGTYNY

SEQ ID NO: 312 - protein, 3 aa, Artificial Sequence
  Description of Artificial Sequence: Synthetic peptide
DVF

SEQ ID NO: 313 - protein, 10 aa, Artificial Sequence
  Description of Artificial Sequence: Synthetic peptide
SSYTSSSTYV

SEQ ID NO: 314 - protein, 6 aa, Artificial Sequence
  Description of Artificial Sequence: Synthetic peptide
SIGTKS

SEQ ID NO: 315 - protein, 3 aa, Artificial Sequence
  Description of Artificial Sequence: Synthetic peptide
DDD

SEQ ID NO: 316 - protein, 11 aa, Artificial Sequence
  Description of Artificial Sequence: Synthetic peptide
QVWESDDDDLV

SEQ ID NO: 317 - protein, 6 aa, Artificial Sequence
  Description of Artificial Sequence: Synthetic peptide
SLRRYY

SEQ ID NO: 318 - protein, 3 aa, Artificial Sequence
  Description of Artificial Sequence: Synthetic peptide
GKN

SEQ ID NO: 319 - protein, 13 aa, Artificial Sequence
  Description of Artificial Sequence: Synthetic peptide
NSRDISDNQWQWI

SEQ ID NO: 320 - protein, 9 aa, Artificial Sequence
  Description of Artificial Sequence: Synthetic peptide
SSDVGGYKY

SEQ ID NO: 321 - protein, 3 aa, Artificial Sequence
  Description of Artificial Sequence: Synthetic peptide
DVN

SEQ ID NO: 322 - protein, 11 aa, Artificial Sequence
  Description of Artificial Sequence: Synthetic peptide
SSYTGRMNLYV

SEQ ID NO: 323 - protein, 6 aa, Artificial Sequence
  Description of Artificial Sequence: Synthetic peptide
NIRTKG

SEQ ID NO: 324 - protein, 3 aa, Artificial Sequence
  Description of Artificial Sequence: Synthetic peptide
YAS

SEQ ID NO: 325 - protein, 11 aa, Artificial Sequence
  Description of Artificial Sequence: Synthetic peptide
QVWDSSSDLVV

SEQ ID NO: 326 - protein, 9 aa, Artificial Sequence
  Description of Artificial Sequence: Synthetic peptide
SSDVGGYDY

SEQ ID NO: 327 - protein, 3 aa, Artificial Sequence
  Description of Artificial Sequence: Synthetic peptide
DVS

SEQ ID NO: 328 - protein, 10 aa, Artificial Sequence
  Description of Artificial Sequence: Synthetic peptide
SSYTSSSPVV

SEQ ID NO: 329 - protein, 9 aa, Artificial Sequence
  Description of Artificial Sequence: Synthetic peptide
SRDVGSYDL

SEQ ID NO: 330 - protein, 3 aa, Artificial Sequence
  Description of Artificial Sequence: Synthetic peptide
EGS

SEQ ID NO: 331 - protein, 10 aa, Artificial Sequence
  Description of Artificial Sequence: Synthetic peptide
SSYTSSNSLV

SEQ ID NO: 332 - protein, 8 aa, Artificial Sequence
  Description of Artificial Sequence: Synthetic peptide
GGSIASNY

SEQ ID NO: 333 - protein, 3 aa, Artificial Sequence
  Description of Artificial Sequence: Synthetic peptide
EDN

SEQ ID NO: 334 - protein, 10 aa, Artificial Sequence
  Description of Artificial Sequence: Synthetic peptide
QSYDSSNPVV

SEQ ID NO: 335 - protein, 7 aa, Artificial Sequence
  Description of Artificial Sequence: Synthetic peptide
SSIGSND

SEQ ID NO: 336 - protein, 3 aa, Artificial Sequence
  Description of Artificial Sequence: Synthetic peptide
SNN

SEQ ID NO: 337 - protein, 10 aa, Artificial Sequence
  Description of Artificial Sequence: Synthetic peptide
AWDDSLSAVV

SEQ ID NO: 338 - protein, 8 aa, Artificial Sequence
  Description of Artificial Sequence: Synthetic peptide
SSNIGSNT

SEQ ID NO: 339 - protein, 3 aa, Artificial Sequence
  Description of Artificial Sequence: Synthetic peptide
INN

SEQ ID NO: 340 - protein, 12 aa, Artificial Sequence
  Description of Artificial Sequence: Synthetic peptide
AEWYDSLNVHYV

SEQ ID NO: 341 - protein, 8 aa, Artificial Sequence
  Description of Artificial Sequence: Synthetic peptide
SSNIGSNT

SEQ ID NO: 342 - protein, 3 aa, Artificial Sequence
  Description of Artificial Sequence: Synthetic peptide
INN

SEQ ID NO: 343 - protein, 12 aa, Artificial Sequence
  Description of Artificial Sequence: Synthetic peptide
AECYDSLNDHYV

SEQ ID NO: 344 - protein, 8 aa, Artificial Sequence
  Description of Artificial Sequence: Synthetic peptide
SSNIGSNT

SEQ ID NO: 345 - protein, 3 aa, Artificial Sequence
  Description of Artificial Sequence: Synthetic peptide
SNN

SEQ ID NO: 346 - protein, 12 aa, Artificial Sequence
  Description of Artificial Sequence: Synthetic peptide
AAWDDSLNVHYV

SEQ ID NO: 347 - protein, 8 aa, Artificial Sequence
  Description of Artificial Sequence: Synthetic peptide
SSNIGSNP

SEQ ID NO: 348 - protein, 3 aa, Artificial Sequence
  Description of Artificial Sequence: Synthetic peptide
NNN

SEQ ID NO: 349 - protein, 10 aa, Artificial Sequence
  Description of Artificial Sequence: Synthetic peptide
AAWDDSLNGL

SEQ ID NO: 350 - protein, 6 aa, Artificial Sequence
  Description of Artificial Sequence: Synthetic peptide
SLRSYY

SEQ ID NO: 351 - protein, 3 aa, Artificial Sequence
  Description of Artificial Sequence: Synthetic peptide
GKN

SEQ ID NO: 352 - protein, 11 aa, Artificial Sequence
  Description of Artificial Sequence: Synthetic peptide
NSRDSSGDVRV

SEQ ID NO: 353 - protein, 8 aa, Artificial Sequence
  Description of Artificial Sequence: Synthetic peptide
SSNIGSNP

SEQ ID NO: 354 - protein, 3 aa, Artificial Sequence
  Description of Artificial Sequence: Synthetic peptide
DNN

SEQ ID NO: 355 - protein, 11 aa, Artificial Sequence
  Description of Artificial Sequence: Synthetic peptide
EAWDDSLSGPV

SEQ ID NO: 356 - protein, 8 aa, Artificial Sequence
  Description of Artificial Sequence: Synthetic peptide
SSNIGGNS

SEQ ID NO: 357 - protein, 3 aa, Artificial Sequence
  Description of Artificial Sequence: Synthetic peptide
RNN

SEQ ID NO: 358 - protein, 11 aa, Artificial Sequence
  Description of Artificial Sequence: Synthetic peptide
AAWDDSLNGWV

SEQ ID NO: 359 - protein, 8 aa, Artificial Sequence
  Description of Artificial Sequence: Synthetic peptide
SGSIASNY

SEQ ID NO: 360 - protein, 3 aa, Artificial Sequence
  Description of Artificial Sequence: Synthetic peptide
EDN

SEQ ID NO: 361 - protein, 11 aa, Artificial Sequence
  Description of Artificial Sequence: Synthetic peptide
QSYDPNNHGVV

SEQ ID NO: 362 - protein, 25 aa, Artificial Sequence
  Description of Artificial Sequence: Synthetic peptide
EVQLVESGPGVVSPSATLFLTCSVS

SEQ ID NO: 363 - protein, 17 aa, Artificial Sequence
  Description of Artificial Sequence: Synthetic peptide
WNWIRQPPGKPLEWIGF

SEQ ID NO: 364 - protein, 38 aa, Artificial Sequence
  Description of Artificial Sequence: Synthetic polypeptide
NKNPSLKSRVTISSDTSKNEFSLTLTSVTAADTAVYYC

SEQ ID NO: 365 - protein, 11 aa, Artificial Sequence
  Description of Artificial Sequence: Synthetic peptide
WSRGTLVTVSS

SEQ ID NO: 366 - protein, 25 aa, Artificial Sequence
  Description of Artificial Sequence: Synthetic peptide
EVQLVESGPGLVKPSETLSLTCTVS

SEQ ID NO: 367 - protein, 17 aa, Artificial Sequence
  Description of Artificial Sequence: Synthetic peptide
WSWIRQPAGKGLEWIGR

SEQ ID NO: 368 - protein, 38 aa, Artificial Sequence
  Description of Artificial Sequence: Synthetic polypeptide
NYNPSLKSRVTMSVDTSKNQFSLKLSSVTAADTAVYYC

SEQ ID NO: 369 - protein, 11 aa, Artificial Sequence
  Description of Artificial Sequence: Synthetic peptide
WGQGTLVTVSS

SEQ ID NO: 370 - protein, 25 aa, Artificial Sequence
  Description of Artificial Sequence: Synthetic peptide
EVQLVESGPGLVKPSATLFLTCSVS

SEQ ID NO: 371 - protein, 17 aa, Artificial Sequence
  Description of Artificial Sequence: Synthetic peptide
WNWIRQPPGKPLEWIGF

SEQ ID NO: 372 - protein, 38 aa, Artificial Sequence
  Description of Artificial Sequence: Synthetic polypeptide
NKNPSLKSRVSISSDPSKNEFSLTLTSVTAADTAVYYC

SEQ ID NO: 373 - protein, 11 aa, Artificial Sequence
  Description of Artificial Sequence: Synthetic peptide
WSRGTLVTVSS

SEQ ID NO: 374 - protein, 25 aa, Artificial Sequence
  Description of Artificial Sequence: Synthetic peptide
QVQLQQSGPGLVKPSQTLSLTCAIS

SEQ ID NO: 375 - protein, 17 aa, Artificial Sequence
  Description of Artificial Sequence: Synthetic peptide
WNWIRQSPSRGLEWLGR

SEQ ID NO: 376 - protein, 38 aa, Artificial Sequence
  Description of Artificial Sequence: Synthetic polypeptide
DYAVSVKSRITINPDTSKNQFSLQLSSVTPEDTAVYYC

SEQ ID NO: 377 - protein, 11 aa, Artificial Sequence
  Description of Artificial Sequence: Synthetic peptide
WGQGTTVTVSS

SEQ ID NO: 378 - protein, 25 aa, Artificial Sequence
  Description of Artificial Sequence: Synthetic peptide
QVQLVQSGGGVVQPGRSLRLSCAAS

SEQ ID NO: 379 - protein, 17 aa, Artificial Sequence
  Description of Artificial Sequence: Synthetic peptide
MHWVRQAPGKGLEWLAV

SEQ ID NO: 380 - protein, 38 aa, Artificial Sequence
  Description of Artificial Sequence: Synthetic polypeptide
YYADSVKGRFTISRDKSKNTLYLQINSLRAEDTAVYYC

SEQ ID NO: 381 - protein, 11 aa, Artificial Sequence
  Description of Artificial Sequence: Synthetic peptide
WGQGTTVTVSS

SEQ ID NO: 382 - protein, 25 aa, Artificial Sequence
  Description of Artificial Sequence: Synthetic peptide
QVQLVQSGGGVVQPGKSLRLSCTAS

SEQ ID NO: 383 - protein, 17 aa, Artificial Sequence
  Description of Artificial Sequence: Synthetic peptide
IHWVRQAPGKGLEWVGV

SEQ ID NO: 384 - protein, 38 aa, Artificial Sequence
  Description of Artificial Sequence: Synthetic polypeptide
YYGDSVKGRFTISRDNAKNSLYLQMNSLRVEDTAVYYC

SEQ ID NO: 385 - protein, 11 aa, Artificial Sequence
  Description of Artificial Sequence: Synthetic peptide
WGQGTTVTVSS

SEQ ID NO: 386 - protein, 25 aa, Artificial Sequence
  Description of Artificial Sequence: Synthetic peptide
QVTLKESGPTRVKPTQTLTLTCTFS

SEQ ID NO: 387 - protein, 17 aa, Artificial Sequence
  Description of Artificial Sequence: Synthetic peptide
VGWIRQPPGKALEWLAL

SEQ ID NO: 388 - protein, 38 aa, Artificial Sequence
  Description of Artificial Sequence: Synthetic polypeptide
RYSPSLKSRLTITKDTSKNQVVLTMTNMDPVDTATYYC

SEQ ID NO: 389 - protein, 11 aa, Artificial Sequence
  Description of Artificial Sequence: Synthetic peptide
WGQGTTVTVSS

SEQ ID NO: 390 - protein, 25 aa, Artificial Sequence
  Description of Artificial Sequence: Synthetic peptide
QVQLVQSGGGVVQPGRSLRLSCAAS

SEQ ID NO: 391 - protein, 17 aa, Artificial Sequence
  Description of Artificial Sequence: Synthetic peptide
MHWVRQAPGKGLEWVAV

SEQ ID NO: 392 - protein, 38 aa, Artificial Sequence
  Description of Artificial Sequence: Synthetic polypeptide
NYADFVEGRFTISRDNSKNTLYLQMNSLRPEDTGVYYC

SEQ ID NO: 393 - protein, 11 aa, Artificial Sequence
  Description of Artificial Sequence: Synthetic peptide
WGQGTLVTVSS

SEQ ID NO: 394 - protein, 25 aa, Artificial Sequence
  Description of Artificial Sequence: Synthetic peptide
QVQLVQSGGGLVQPGRSLRLSCAAS

SEQ ID NO: 395 - protein, 17 aa, Artificial Sequence
  Description of Artificial Sequence: Synthetic peptide
MHWVRQAPGKGLEWVAA

SEQ ID NO: 396 - protein, 38 aa, Artificial Sequence
  Description of Artificial Sequence: Synthetic polypeptide
PYADSVKGRFTISRDNAKNSLYLQMNSLRDEDTAVYYC

SEQ ID NO: 397 - protein, 11 aa, Artificial Sequence
  Description of Artificial Sequence: Synthetic peptide
WGQGTLVTVSS

SEQ ID NO: 398 - protein, 25 aa, Artificial Sequence
  Description of Artificial Sequence: Synthetic peptide
QVQLVQSGAEVKKPGASVKFSCKAS

SEQ ID NO: 399 - protein, 17 aa, Artificial Sequence
  Description of Artificial Sequence: Synthetic peptide
IHWVRQAPGQGLEWMGW

SEQ ID NO: 400 - protein, 38 aa, Artificial Sequence
  Description of Artificial Sequence: Synthetic polypeptide
NFAQRFQGRVTMTTDTSVSTAYMDLRRLRSDDTAVYYC

SEQ ID NO: 401 - protein, 11 aa, Artificial Sequence
  Description of Artificial Sequence: Synthetic peptide
WGQGTLVTVSS

SEQ ID NO: 402 - protein, 25 aa, Artificial Sequence
  Description of Artificial Sequence: Synthetic peptide
QVHLVQSGGGVVQPGRSLRLSCAAS

SEQ ID NO: 403 - protein, 17 aa, Artificial Sequence
  Description of Artificial Sequence: Synthetic peptide
MHWVRQAPGKGLEWVAL

SEQ ID NO: 404 - protein, 38 aa, Artificial Sequence
  Description of Artificial Sequence: Synthetic polypeptide
YYAESVKGRFTISRDNSKNTLYLQMNSLRAEDTAVYYC

SEQ ID NO: 405 - protein, 11 aa, Artificial Sequence
  Description of Artificial Sequence: Synthetic peptide
WGQGTMVTVSS

SEQ ID NO: 406 - protein, 25 aa, Artificial Sequence
  Description of Artificial Sequence: Synthetic peptide
QVQLVQSGTEVKKPGASVKVSCKAS

SEQ ID NO: 407 - protein, 17 aa, Artificial Sequence
  Description of Artificial Sequence: Synthetic peptide
LHWVRQAPGQGLEWMGW

SEQ ID NO: 408 - protein, 38 aa, Artificial Sequence
  Description of Artificial Sequence: Synthetic polypeptide
NYAQKFQGRVTLTRDTSISTAYMELSGLRSDDTAVYYC

SEQ ID NO: 409 - protein, 11 aa, Artificial Sequence
  Description of Artificial Sequence: Synthetic peptide
WGQGTLVTVSS

SEQ ID NO: 410 - protein, 25 aa, Artificial Sequence
  Description of Artificial Sequence: Synthetic peptide
QVTLKESGPTLVKPTQTLTLTCTLS

SEQ ID NO: 411 - protein, 17 aa, Artificial Sequence
  Description of Artificial Sequence: Synthetic peptide
VSWIRQPPGKALEWLAR

SEQ ID NO: 412 - protein, 38 aa, Artificial Sequence
  Description of Artificial Sequence: Synthetic polypeptide
FYSTALKTRLTISKDTSKNQVVFTMTSMDPVDTATYYC

SEQ ID NO: 413 - protein, 11 aa, Artificial Sequence
  Description of Artificial Sequence: Synthetic peptide
WGRGTLVTVSS

SEQ ID NO: 414 - protein, 25 aa, Artificial Sequence
  Description of Artificial Sequence: Synthetic peptide
QVQLVQSGGGVVQPGRSLRLSCAAS

SEQ ID NO: 415 - protein, 17 aa, Artificial Sequence
  Description of Artificial Sequence: Synthetic peptide
FHWVRQAPGKGLQWVAV

SEQ ID NO: 416 - protein, 38 aa, Artificial Sequence
  Description of Artificial Sequence: Synthetic polypeptide
LYADSVKGRFTISRDDSQNMLYLEMHSLRLEDTAVYYC

SEQ ID NO: 417 - protein, 11 aa, Artificial Sequence
  Description of Artificial Sequence: Synthetic peptide
WGQGTTVTVSS

SEQ ID NO: 418 - protein, 25 aa, Artificial Sequence
  Description of Artificial Sequence: Synthetic peptide
QVQLVQSGAEVKKPGESLKISCKGS

SEQ ID NO: 419 - protein, 17 aa, Artificial Sequence
  Description of Artificial Sequence: Synthetic peptide
IGWVRQMPGKGLEWMGI

SEQ ID NO: 420 - protein, 38 aa, Artificial Sequence
  Description of Artificial Sequence: Synthetic polypeptide
RYSPSFQGQVTISADKSISTAYLQWSSLKASDTAMYYC

SEQ ID NO: 421 - protein, 11 aa, Artificial Sequence
  Description of Artificial Sequence: Synthetic peptide
WGQGTLVTVSS

SEQ ID NO: 422 - protein, 25 aa, Artificial Sequence
  Description of Artificial Sequence: Synthetic peptide
QVQLQQSGPGLVKASQTLSLTCVIS

SEQ ID NO: 423 - protein, 17 aa, Artificial Sequence
  Description of Artificial Sequence: Synthetic peptide
WSWIRQSPSRGLEWLAR

SEQ ID NO: 424 - protein, 38 aa, Artificial Sequence
  Description of Artificial Sequence: Synthetic polypeptide
DFAQSVRSRIVINPDTSKNHVYLQLRSVTPEDTAVYYC

SEQ ID NO: 425 - protein, 11 aa, Artificial Sequence
  Description of Artificial Sequence: Synthetic peptide
WGQGTLVTVSS

SEQ ID NO: 426 - protein, 25 aa, Artificial Sequence
  Description of Artificial Sequence: Synthetic peptide
EVQLVQSGAEVKKPGSSVKVSCKTS

SEQ ID NO: 427 - protein, 17 aa, Artificial Sequence
  Description of Artificial Sequence: Synthetic peptide
ISWVRQAPGQGLEWMGW

SEQ ID NO: 428 - protein, 38 aa, Artificial Sequence [sequence omitted]

SEQ ID NO: 429 - protein, 11 aa, Artificial Sequence
  Description of Artificial Sequence: Synthetic peptide
WGKGTLVTVSS

SEQ ID NO: 430 - protein, 25 aa, Artificial Sequence [sequence omitted]

SEQ ID NO: 431 - protein, 17 aa, Artificial Sequence
  Description of Artificial Sequence: Synthetic peptide
ISWLRQAPGQGLEWMGW

SEQ ID NO: 432 - protein, 38 aa, Artificial Sequence
  Description of Artificial Sequence: Synthetic polypeptide
NYAQKFQGRVTMTRDTSISTAYMELSRLRSDDTAVYYC

SEQ ID NO: 433 - protein, 11 aa, Artificial Sequence
  Description of Artificial Sequence: Synthetic peptide
WGQGTLVTVSS

SEQ ID NO: 434 - protein, 25 aa, Artificial Sequence [sequence omitted]

SEQ ID NO: 435 - protein, 17 aa, Artificial Sequence
  Description of Artificial Sequence: Synthetic peptide
ISWVRQAPGQGLEWMGG

SEQ ID NO: 436 - protein, 38 aa, Artificial Sequence
  Description of Artificial Sequence: Synthetic polypeptide
NYAQKFQDRVAITADKSTSTAYMELSSLRSEDTAVYYC

SEQ ID NO: 437 - protein, 11 aa, Artificial Sequence
  Description of Artificial Sequence: Synthetic peptide
WGQGTLVTVSS

SEQ ID NO: 438 - protein, 25 aa, Artificial Sequence
  Description of Artificial Sequence: Synthetic peptide
QVQLVQSGGGLVQPGGSLRLSCAAS

SEQ ID NO: 439 - protein, 17 aa, Artificial Sequence
  Description of Artificial Sequence: Synthetic peptide
MSWVRQAPGKGLEWVAN

SEQ ID NO: 440 - protein, 38 aa, Artificial Sequence
  Description of Artificial Sequence: Synthetic polypeptide
YYVDSVKGRFTISRDNAKNSLYLQMNSLRAEDTAVYYC

SEQ ID NO: 441 - protein, 11 aa, Artificial Sequence
  Description of Artificial Sequence: Synthetic peptide
WGQGTTVTVSS

SEQ ID NO: 442 - protein, 25 aa, Artificial Sequence
  Description of Artificial Sequence: Synthetic peptide
QVQLVQSGGGLVQPGRSLRLSCAAS

SEQ ID NO: 443 - protein, 17 aa, Artificial Sequence
  Description of Artificial Sequence: Synthetic peptide
MHWVRQVPGKGLEWVSG

SEQ ID NO: 444 - protein, 38 aa, Artificial Sequence
  Description of Artificial Sequence: Synthetic polypeptide
GYADSVKGRFTISRDNAKNSLYLQMNSLRAEDTALYYC

SEQ ID NO: 445 - protein, 11 aa, Artificial Sequence
  Description of Artificial Sequence: Synthetic peptide
WGQGTMVTVSS

SEQ ID NO: 446 - protein, 25 aa, Artificial Sequence
  Description of Artificial Sequence: Synthetic peptide
QVQLVQSGGGLVQPGRSLRLSCAAS

SEQ ID NO: 447 - protein, 17 aa, Artificial Sequence
  Description of Artificial Sequence: Synthetic peptide
MHWVRQVPGKGLEWVSG

SEQ ID NO: 448 - protein, 38 aa, Artificial Sequence
  Description of Artificial Sequence: Synthetic polypeptide
GYADSVKGRFTISRDNVKNSLYLQMTSLRAEDTAVYFC

SEQ ID NO: 449 - protein, 11 aa, Artificial Sequence
  Description of Artificial Sequence: Synthetic peptide
WGQGTTVTVSS

SEQ ID NO: 450 - protein, 25 aa, Artificial Sequence
  Description of Artificial Sequence: Synthetic peptide
EVQLVQSGAEVKKPGESLRISCKAS

SEQ ID NO: 451 - protein, 17 aa, Artificial Sequence
  Description of Artificial Sequence: Synthetic peptide
IGWVRQMPGKGLEWMGS

SEQ ID NO: 452 - protein, 38 aa, Artificial Sequence
  Description of Artificial Sequence: Synthetic polypeptide
KYSPSFQGQVTISADRSISTAYLQWSGLKASDTAMYYC

SEQ ID NO: 453 - protein, 11 aa, Artificial Sequence
  Description of Artificial Sequence: Synthetic peptide
WGQGTLVTVSS

SEQ ID NO: 454 - protein, 25 aa, Artificial Sequence
  Description of Artificial Sequence: Synthetic peptide
EVQLVQSGAEVKKPGASVKVSCKAS

SEQ ID NO: 455 - protein, 17 aa, Artificial Sequence
  Description of Artificial Sequence: Synthetic peptide
ISWVRQAPGQGLEWMGW

SEQ ID NO: 456 - protein, 38 aa, Artificial Sequence
  Description of Artificial Sequence: Synthetic polypeptide
KYAQKLQGRVTMTTDTSTSTAYMELRSLRSDDTAVYYC

SEQ ID NO: 457 - protein, 11 aa, Artificial Sequence
  Description of Artificial Sequence: Synthetic peptide
WGQGTLVTVSS

SEQ ID NO: 458 - protein, 25 aa, Artificial Sequence
  Description of Artificial Sequence: Synthetic peptide
EVQLVQSGAEVEKPGSSVKVSCKAS

SEQ ID NO: 459 - protein, 17 aa, Artificial Sequence
  Description of Artificial Sequence: Synthetic peptide
ISWVRQAPGQGLEWMGW

SEQ ID NO: 460 - protein, 38 aa, Artificial Sequence
  Description of Artificial Sequence: Synthetic polypeptide
RYAQKFQGRVTLTIDTSSSTAYMELSSLRSEDTAVYYC

SEQ ID NO: 461 - protein, 11 aa, Artificial Sequence
  Description of Artificial Sequence: Synthetic peptide
WGQGTMVTVSS

SEQ ID NO: 462 - protein, 25 aa, Artificial Sequence [sequence omitted]

SEQ ID NO: 463 - protein, 17 aa, Artificial Sequence
  Description of Artificial Sequence: Synthetic peptide
ISWVRQAPGQGLEWMGW

SEQ ID NO: 464 - protein, 38 aa, Artificial Sequence
  Description of Artificial Sequence: Synthetic polypeptide
NYAQKLQGRVTMTTDTSTSTAYMEVRSLRSDDTAVYYC

SEQ ID NO: 465 - protein, 11 aa, Artificial Sequence
  Description of Artificial Sequence: Synthetic peptide
WGQGTLVTVSS

SEQ ID NO: 466 - protein, 25 aa, Artificial Sequence
  Description of Artificial Sequence: Synthetic peptide
QVTLKESGPTLVKPTQTLTLTCTFS

SEQ ID NO: 467 - protein, 17 aa, Artificial Sequence
  Description of Artificial Sequence: Synthetic peptide
VGWIRQPPGKALEWLAL

SEQ ID NO: 468 - protein, 38 aa, Artificial Sequence
  Description of Artificial Sequence: Synthetic polypeptide
RYSPSLRSRLTITRDTSKNQVVLTVTDMDPADTGTYYC

SEQ ID NO: 469 - protein, 11 aa, Artificial Sequence
  Description of Artificial Sequence: Synthetic peptide
WGQGTLVTVSS

SEQ ID NO: 470 - protein, 25 aa, Artificial Sequence
  Description of Artificial Sequence: Synthetic peptide
QVTLKESGPALVKSTQTLTLTCTIS

SEQ ID NO: 471 - protein, 17 aa, Artificial Sequence
  Description of Artificial Sequence: Synthetic peptide
VSWIRQSPGKALEWLAL

SEQ ID NO: 472 - protein, 38 aa, Artificial Sequence
  Description of Artificial Sequence: Synthetic polypeptide
YYTTSLKTRLTITKDTSKNQVVLTMTSMDPLDTATYYC

SEQ ID NO: 473 - protein, 11 aa, Artificial Sequence
  Description of Artificial Sequence: Synthetic peptide
WGQGTLVTVSS

SEQ ID NO: 474 - protein, 25 aa, Artificial Sequence
  Description of Artificial Sequence: Synthetic peptide
QVQLVQSGGGLVKPGGSLRLSCAAS

SEQ ID NO: 475 - protein, 17 aa, Artificial Sequence
  Description of Artificial Sequence: Synthetic peptide
MTWFRQAPGKGLEWISY

SEQ ID NO: 476 - protein, 38 aa, Artificial Sequence
  Description of Artificial Sequence: Synthetic polypeptide
KYADSVKGRFTISRDNAKNSLYLQMDSLRAEDTAVYYC

SEQ ID NO: 477 - protein, 11 aa, Artificial Sequence
  Description of Artificial Sequence: Synthetic peptide
WGQGTLVTVSS

SEQ ID NO: 478 - protein, 25 aa, Artificial Sequence
  Description of Artificial Sequence: Synthetic peptide
QVQLVQSGGGVVQPGKSLRLSCAAS

SEQ ID NO: 479 - protein, 17 aa, Artificial Sequence
  Description of Artificial Sequence: Synthetic peptide
VHWVRQAPGKGLEWVAV

SEQ ID NO: 480 - protein, 38 aa, Artificial Sequence
  Description of Artificial Sequence: Synthetic polypeptide
YYADSVKGRFTLSRDNSKNTVYLQLSSLRREDTAVYYC

SEQ ID NO: 481 - protein, 11 aa, Artificial Sequence
  Description of Artificial Sequence: Synthetic peptide
WGHGTLVTVSS

SEQ ID NO: 482 - protein, 25 aa, Artificial Sequence
  Description of Artificial Sequence: Synthetic peptide
QVQLVQSGGGVVQPGRSLRLSCAAS

SEQ ID NO: 483 - protein, 17 aa, Artificial Sequence
  Description of Artificial Sequence: Synthetic peptide
MHWVRQAPGKGLEYVSA

SEQ ID NO: 484 - protein, 38 aa, Artificial Sequence
  Description of Artificial Sequence: Synthetic polypeptide
YYADSVKGRFTISRDNGKNSLYLQMSSLRAEDTAVYYC

SEQ ID NO: 485 - protein, 11 aa, Artificial Sequence
  Description of Artificial Sequence: Synthetic peptide
WGQGTMVTVSS

SEQ ID NO: 486 - protein, 25 aa, Artificial Sequence
  Description of Artificial Sequence: Synthetic peptide
QVQLVQSGGGLVQPGGSLRLSCAAS

SEQ ID NO: 487 - protein, 17 aa, Artificial Sequence
  Description of Artificial Sequence: Synthetic peptide
MSWVRQAPGKGLEWVAN

SEQ ID NO: 488 - protein, 38 aa, Artificial Sequence
  Description of Artificial Sequence: Synthetic polypeptide
YYVDSVKGRFTISRDNAKNSLYLQMNGLRAEDTAVYYC

SEQ ID NO: 489 - protein, 11 aa, Artificial Sequence
  Description of Artificial Sequence: Synthetic peptide
WGQGTTVTVSS

SEQ ID NO: 490 - protein, 25 aa, Artificial Sequence
  Description of Artificial Sequence: Synthetic peptide
QVQLVQSGGGLVQPGRSLRLSCAAS

SEQ ID NO: 491 - protein, 17 aa, Artificial Sequence
  Description of Artificial Sequence: Synthetic peptide
MHWVRQVPGKGLEWVSG

SEQ ID NO: 492 - protein, 38 aa, Artificial Sequence; identical to SEQ ID NO: 444
  Description of Artificial Sequence: Synthetic polypeptide

SEQ ID NO: 493 - protein, 11 aa, Artificial Sequence
  Description of Artificial Sequence: Synthetic peptide
WGQGTMVTVSS

SEQ ID NO: 494 - protein, 25 aa, Artificial Sequence
  Description of Artificial Sequence: Synthetic peptide
QVQLVQSGGGLVQPGGSLRLSCATS

SEQ ID NO: 495 - protein, 17 aa, Artificial Sequence
  Description of Artificial Sequence: Synthetic peptide
MHWVRQAPGKGLEWVSG

SEQ ID NO: 496 - protein, 38 aa, Artificial Sequence
  Description of Artificial Sequence: Synthetic polypeptide
GYVDSVKGRFTISRDNRNNKVYLQMNNLRAEDTAVYYC

SEQ ID NO: 497 - protein, 11 aa, Artificial Sequence
  Description of Artificial Sequence: Synthetic peptide
WGLGTLVTVSS

SEQ ID NO: 498 - protein, 25 aa, Artificial Sequence
  Description of Artificial Sequence: Synthetic peptide
EVQLVESGPGLVKPSGTLSLTCAVS

SEQ ID NO: 499 - protein, 17 aa, Artificial Sequence
  Description of Artificial Sequence: Synthetic peptide
WSWVRQPPGKGLEWIGE

SEQ ID NO: 500 - protein, 38 aa, Artificial Sequence
  Description of Artificial Sequence: Synthetic polypeptide
NYNPSLKSRVTISVDTSKNQFSLKLSSVTAADTAVYYC

SEQ ID NO: 501 - protein, 11 aa, Artificial Sequence
  Description of Artificial Sequence: Synthetic peptide
WGQGTMVTVSS

SEQ ID NO: 502 - protein, 25 aa, Artificial Sequence
  Description of Artificial Sequence: Synthetic peptide
QVTLKESGPGLVNPSETLSLTCTVS

SEQ ID NO: 503 - protein, 17 aa, Artificial Sequence
  Description of Artificial Sequence: Synthetic peptide
WSWIRQSPGKGLEWIGY

SEQ ID NO: 504 - protein, 38 aa, Artificial Sequence
  Description of Artificial Sequence: Synthetic polypeptide
IYNPSLKSRLTMSIDTSKNQLSLNLRSLTAADTAVYYC

SEQ ID NO: 505 - protein, 11 aa, Artificial Sequence
  Description of Artificial Sequence: Synthetic peptide
WGQGTLVTVSS

SEQ ID NO: 506 - protein, 25 aa, Artificial Sequence
  Description of Artificial Sequence: Synthetic peptide
EVQLVESGPGLMKPSETLFLSCSVS

SEQ ID NO: 507 - protein, 17 aa, Artificial Sequence
  Description of Artificial Sequence: Synthetic peptide
WNWIRQTPGKPLEWMGI

SEQ ID NO: 508 - protein, 38 aa, Artificial Sequence
  Description of Artificial Sequence: Synthetic polypeptide
NKNPPLLSRVSISSDPSNNEFSLTLTSVTAADTAVYYC

SEQ ID NO: 509 - protein, 11 aa, Artificial Sequence
  Description of Artificial Sequence: Synthetic peptide
WSGGTLATVSS

SEQ ID NO: 510 - protein, 25 aa, Artificial Sequence
  Description of Artificial Sequence: Synthetic peptide
EVQLVESGPGLVSPSATLFLTCSVS

SEQ ID NO: 511 - protein, 17 aa, Artificial Sequence
  Description of Artificial Sequence: Synthetic peptide
WNWIRQAPGKPLEWMGV

SEQ ID NO: 512 - protein, 38 aa, Artificial Sequence
  Description of Artificial Sequence: Synthetic polypeptide
NKNPSLKSRVTISSETSDNKFSLTLTSVTAEDTAVYYC

SEQ ID NO: 513 - protein, 11 aa, Artificial Sequence
  Description of Artificial Sequence: Synthetic peptide
WSRGTLGTVSS

SEQ ID NO: 514 - protein, 25 aa, Artificial Sequence
  Description of Artificial Sequence: Synthetic peptide
EVQLVESGPGVVSPSATLFLTCSVS

SEQ ID NO: 515 - protein, 17 aa, Artificial Sequence
  Description of Artificial Sequence: Synthetic peptide
WNWIRQPPGKPLEWIGV

SEQ ID NO: 516 - protein, 38 aa, Artificial Sequence
  Description of Artificial Sequence: Synthetic polypeptide
NKNPSLKSRVTISSKTSDNKFSLTLTSVTAEDTAVYYC

SEQ ID NO: 517 - protein, 11 aa, Artificial Sequence
  Description of Artificial Sequence: Synthetic peptide
WSRGTLGTVSS

SEQ ID NO: 518 - protein, 25 aa, Artificial Sequence
  Description of Artificial Sequence: Synthetic peptide
EVQLVESGPGVVSPSATLFLTCSVS

SEQ ID NO: 519 - protein, 17 aa, Artificial Sequence
  Description of Artificial Sequence: Synthetic peptide
WNWIRQAPGKALEWIGF

SEQ ID NO: 520 - protein, 38 aa, Artificial Sequence
  Description of Artificial Sequence: Synthetic polypeptide
NNNPSLKSRVTISSDTSKNEFSLTLTSVTAADTAVYYC

SEQ ID NO: 521 - protein, 11 aa, Artificial Sequence
  Description of Artificial Sequence: Synthetic peptide
WSRGTLVTVSS

SEQ ID NO: 522 - protein, 25 aa, Artificial Sequence
  Description of Artificial Sequence: Synthetic peptide
QVQLVQSGAEVKKPGESLKISCKGS

SEQ ID NO: 523 - protein, 17 aa, Artificial Sequence
  Description of Artificial Sequence: Synthetic peptide
IGWVRQMPGKGLEWMGI

SEQ ID NO: 524 - protein, 38 aa, Artificial Sequence; identical to SEQ ID NO: 420
  Description of Artificial Sequence: Synthetic polypeptide

SEQ ID NO: 525 - protein, 11 aa, Artificial Sequence
  Description of Artificial Sequence: Synthetic peptide
WGQGTMVTVSS

SEQ ID NO: 526 - protein, 25 aa, Artificial Sequence
  Description of Artificial Sequence: Synthetic peptide
QVQLVQSGAEVKKPGNSLKISCKGS

SEQ ID NO: 527 - protein, 17 aa, Artificial Sequence
  Description of Artificial Sequence: Synthetic peptide
IAWVRQMPGKGLEWLGS

SEQ ID NO: 528 - protein, 38 aa, Artificial Sequence
  Description of Artificial Sequence: Synthetic polypeptide
RYSPSLQGQVTISVDKSLSTAYLQWRSLKASDTAMYYC

SEQ ID NO: 529 - protein, 11 aa, Artificial Sequence
  Description of Artificial Sequence: Synthetic peptide
WGQGTTVTVSS

SEQ ID NO: 530 - protein, 25 aa, Artificial Sequence
  Description of Artificial Sequence: Synthetic peptide
EVQLVQSGAEVKKPGESLKISCKGS

SEQ ID NO: 531 - protein, 17 aa, Artificial Sequence
  Description of Artificial Sequence: Synthetic peptide
IGWVRQMPGKGLEWMGI

SEQ ID NO: 532 - protein, 38 aa, Artificial Sequence; identical to SEQ ID NO: 420
  Description of Artificial Sequence: Synthetic polypeptide

SEQ ID NO: 533 - protein, 11 aa, Artificial Sequence
  Description of Artificial Sequence: Synthetic peptide
WGQGTLVTVSS

SEQ ID NO: 534 - protein, 25 aa, Artificial Sequence
  Description of Artificial Sequence: Synthetic peptide
QVQLVQSGVEVKKPGESLKISCKGS

SEQ ID NO: 535 - protein, 17 aa, Artificial Sequence
  Description of Artificial Sequence: Synthetic peptide
IGWVRQMPGKGLEWMGI

SEQ ID NO: 536 - protein, 38 aa, Artificial Sequence; identical to SEQ ID NO: 420
  Description of Artificial Sequence: Synthetic polypeptide

SEQ ID NO: 537 - protein, 11 aa, Artificial Sequence
  Description of Artificial Sequence: Synthetic peptide
WGQGTLVTVSS

SEQ ID NO: 538 - protein, 25 aa, Artificial Sequence
  Description of Artificial Sequence: Synthetic peptide
QVQLQQSGPGLVKPSQTLSLTCAIF

SEQ ID NO: 539 - protein, 17 aa, Artificial Sequence
  Description of Artificial Sequence: Synthetic peptide
WNWIRQSPSRGLEWLGR

SEQ ID NO: 540 - protein, 38 aa, Artificial Sequence
  Description of Artificial Sequence: Synthetic polypeptide
DYAVSVKSRVTINADTSKNQLSLQLNSVTPEDTAVYYC

SEQ ID NO: 541 - protein, 11 aa, Artificial Sequence
  Description of Artificial Sequence: Synthetic peptide
WGQGTLVTVSS

SEQ ID NO: 542 - protein, 25 aa, Artificial Sequence
  Description of Artificial Sequence: Synthetic peptide
LPVLTQPPSASGTPGQRVTISCSGS

SEQ ID NO: 543 - protein, 17 aa, Artificial Sequence
  Description of Artificial Sequence: Synthetic peptide
VNWYQQLPGTAPKLLIY

SEQ ID NO: 544 - protein, 36 aa, Artificial Sequence
  Description of Artificial Sequence: Synthetic polypeptide
QRPSGVPDRFSGSKSGTSASLAISGLQSEDEADYYC

SEQ ID NO: 545 - protein, 10 aa, Artificial Sequence
  Description of Artificial Sequence: Synthetic peptide
FGSGTKVTVL

SEQ ID NO: 546 - protein, 25 aa, Artificial Sequence
  Description of Artificial Sequence: Synthetic peptide
NFMLTQPHSVSESPGKTVTISCTRS

SEQ ID NO: 547 - protein, 17 aa, Artificial Sequence
  Description of Artificial Sequence: Synthetic peptide
VQWYQQRPGSSPTTVIY

SEQ ID NO: 548 - protein, 38 aa, Artificial Sequence
  Description of Artificial Sequence: Synthetic polypeptide
QRPSGVPDRFSGSIDSSSNSASLTISGLTTEDEADYYC

SEQ ID NO: 549 - protein, 10 aa, Artificial Sequence
  Description of Artificial Sequence: Synthetic peptide
FGGGTKLTVL

SEQ ID NO: 550 - protein, 25 aa, Artificial Sequence
  Description of Artificial Sequence: Synthetic peptide
QPGLTQPPSASGTPGQRVTISCSGS

SEQ ID NO: 551 - protein, 17 aa, Artificial Sequence
  Description of Artificial Sequence: Synthetic peptide
VTWYQQLPGTAPKLLIY

SEQ ID NO: 552 - protein, 36 aa, Artificial Sequence
  Description of Artificial Sequence: Synthetic polypeptide
QRPSGVPDRFSASRSGTSASLAITGLQAEDEADYYC

SEQ ID NO: 553 - protein, 10 aa, Artificial Sequence
  Description of Artificial Sequence: Synthetic peptide
FGGGTKLTVL

SEQ ID NO: 554 - protein, 25 aa, Artificial Sequence
  Description of Artificial Sequence: Synthetic peptide
NFMLTQPHSVSESPGNTVTISCTRT

SEQ ID NO: 555 - protein, 17 aa, Artificial Sequence
  Description of Artificial Sequence: Synthetic peptide
VQWYQQRPGSSPTTVIF

SEQ ID NO: 556 - protein, 38 aa, Artificial Sequence
  Description of Artificial Sequence: Synthetic polypeptide
LRPSGVPDRFSGSIDSSSNSASLTISGLKTEDEADYYC

SEQ ID NO: 557 - protein, 10 aa, Artificial Sequence
  Description of Artificial Sequence: Synthetic peptide
FGGGTKLTVL

SEQ ID NO: 558 - protein, 25 aa, Artificial Sequence
  Description of Artificial Sequence: Synthetic peptide
NFMLTQPHSVSESPGKTVIISCTRT

SEQ ID NO: 559 - protein, 17 aa, Artificial Sequence
  Description of Artificial Sequence: Synthetic peptide
VQWYRQRPGSAPTTVIY

SEQ ID NO: 560 - protein, 38 aa, Artificial Sequence
  Description of Artificial Sequence: Synthetic polypeptide
QRPAGVPDRFSGSVDSSSNSASLTITGLKTEDEADYYC

SEQ ID NO: 561 - protein, 10 aa, Artificial Sequence
  Description of Artificial Sequence: Synthetic peptide
FGTGTKLTVL

SEQ ID NO: 562 - protein, 25 aa, Artificial Sequence
  Description of Artificial Sequence: Synthetic peptide
SYELTQPPSVSEAPRQRVTISCSGS

SEQ ID NO: 563 - protein, 17 aa, Artificial Sequence
  Description of Artificial Sequence: Synthetic peptide
VSWYQHLPGKAPKLLIY

SEQ ID NO: 564 - protein, 36 aa, Artificial Sequence
  Description of Artificial Sequence: Synthetic polypeptide
RLPSGVSDRFSGSKSGTSASLAISGLRSEDEADYYC

SEQ ID NO: 565 - protein, 10 aa, Artificial Sequence
  Description of Artificial Sequence: Synthetic peptide
FGGGTKLTVL

SEQ ID NO: 566 - protein, 25 aa, Artificial Sequence
  Description of Artificial Sequence: Synthetic peptide
NFMLTQPHSVSESPGKTVTISCTRS

SEQ ID NO: 567 - protein, 17 aa, Artificial Sequence
  Description of Artificial Sequence: Synthetic peptide
VQWYQQRPGSSPTTVIY

SEQ ID NO: 568 - protein, 38 aa, Artificial Sequence
  Description of Artificial Sequence: Synthetic polypeptide
QRPSGVPDRFSGSIDSSSNSASLTISGLKAEDEADYYC

SEQ ID NO: 569 - protein, 10 aa, Artificial Sequence
  Description of Artificial Sequence: Synthetic peptide
FGGGTKLTVL

SEQ ID NO: 570 - protein, 25 aa, Artificial Sequence
  Description of Artificial Sequence: Synthetic peptide
QPVLTQPPSASGTPGQRVTISCSGS

SEQ ID NO: 571 - protein, 17 aa, Artificial Sequence
  Description of Artificial Sequence: Synthetic peptide
VNWYQQLPGTAPKLLIY

SEQ ID NO: 572 - protein, 36 aa, Artificial Sequence
  Description of Artificial Sequence: Synthetic polypeptide
QRPSGVPDRFSDSKSGTSASLAISGLQSEDEADYFC

SEQ ID NO: 573 - protein, 10 aa, Artificial Sequence
  Description of Artificial Sequence: Synthetic peptide
FGTGTKVTVL

SEQ ID NO: 574 - protein, 25 aa, Artificial Sequence
  Description of Artificial Sequence: Synthetic peptide
QSVLTQPPSASGSPGQSVTISCTGT

SEQ ID NO: 575 - protein, 17 aa, Artificial Sequence
  Description of Artificial Sequence: Synthetic peptide
VSWYQQYPGKAPKLMIY

SEQ ID NO: 576 - protein, 36 aa, Artificial Sequence
  Description of Artificial Sequence: Synthetic polypeptide
KRPSGVPDRFSGSKSGNTASLTVSGLRAEDEADYYC

SEQ ID NO: 577 - protein, 10 aa, Artificial Sequence
  Description of Artificial Sequence: Synthetic peptide
FGGGTKLTVL

SEQ ID NO: 578 - protein, 25 aa, Artificial Sequence
  Description of Artificial Sequence: Synthetic peptide
QPGLTQPPSVSVAPGKTARITCGGN

SEQ ID NO: 579 - protein, 17 aa, Artificial Sequence
  Description of Artificial Sequence: Synthetic peptide
VHWYQQKAGQAPVLVVY

SEQ ID NO: 580 - protein, 36 aa, Artificial Sequence
  Description of Artificial Sequence: Synthetic polypeptide
DRPSEIPERFSGSNSGNTATLTISRAEVGDEADYYC

SEQ ID NO: 581 - protein, 10 aa, Artificial Sequence
  Description of Artificial Sequence: Synthetic peptide
FGTGTKVTVL

SEQ ID NO: 582 - protein, 25 aa, Artificial Sequence
  Description of Artificial Sequence: Synthetic peptide
SSELTQDPAVSVVLGQAVRITCQGD

SEQ ID NO: 583 - protein, 17 aa, Artificial Sequence
  Description of Artificial Sequence: Synthetic peptide
AGWYQQKPGQAPVLVTY

SEQ ID NO: 584 - protein, 36 aa, Artificial Sequence
  Description of Artificial Sequence: Synthetic polypeptide
KRPSGIPDRFSASTSGNTASLTITGAQADDEADYYC

SEQ ID NO: 585 - protein, 10 aa, Artificial Sequence
  Description of Artificial Sequence: Synthetic peptide
FGGGTKLTVL

SEQ ID NO: 586 - protein, 25 aa, Artificial Sequence
  Description of Artificial Sequence: Synthetic peptide
QSALTQPPSVSGSPGQSVTISCTGT

SEQ ID NO: 587 - protein, 17 aa, Artificial Sequence
  Description of Artificial Sequence: Synthetic peptide
VSWYQQPPGKAPKLMIY

SEQ ID NO: 588 - protein, 36 aa, Artificial Sequence
  Description of Artificial Sequence: Synthetic polypeptide
NRPSGVSNRFSGSKSGNTASLTISGLQAEDEADYYC

SEQ ID NO: 589 - protein, 10 aa, Artificial Sequence
  Description of Artificial Sequence: Synthetic peptide
FGTGTKVTVL

SEQ ID NO: 590 - protein, 25 aa, Artificial Sequence
  Description of Artificial Sequence: Synthetic peptide
QSVVTQPPSVSGAPGQRVTISCTGS

SEQ ID NO: 591 - protein, 17 aa, Artificial Sequence
  Description of Artificial Sequence: Synthetic peptide
VQWYQQLPGTAPKLLIW

SEQ ID NO: 592 - protein, 36 aa, Artificial Sequence
  Description of Artificial Sequence: Synthetic polypeptide
NRPSGVPDRFSASKSGTSASLAITGLQAEDEADYFC

SEQ ID NO: 593 - protein, 10 aa, Artificial Sequence
  Description of Artificial Sequence: Synthetic peptide
FGGGTKVTVL

SEQ ID NO: 594 - protein, 25 aa, Artificial Sequence
  Description of Artificial Sequence: Synthetic peptide
NFMLTQPHSVSESPGKTVTISCTRS

SEQ ID NO: 595 - protein, 17 aa, Artificial Sequence
  Description of Artificial Sequence: Synthetic peptide
VQWYQQRPGSSPTTVIY

SEQ ID NO: 596 - protein, 38 aa, Artificial Sequence
  Description of Artificial Sequence: Synthetic polypeptide
DRPSGVPDRFSGSIDSSSNSASLTISGLKPEDEADYYC

SEQ ID NO: 597 - protein, 10 aa, Artificial Sequence
  Description of Artificial Sequence: Synthetic peptide
FGGGTQLTVL

SEQ ID NO: 598 - protein, 25 aa, Artificial Sequence
  Description of Artificial Sequence: Synthetic peptide
QTVVTQEPAVSVALGQTVRITCQGD

SEQ ID NO: 599 - protein, 17 aa, Artificial Sequence
  Description of Artificial Sequence: Synthetic peptide
ASWYQQKPGQAPVLVVY

SEQ ID NO: 600 - protein, 36 aa, Artificial Sequence
  Description of Artificial Sequence: Synthetic polypeptide
KRPSGIPDRFSGSTSGNTASLTITGAQAEDEADYYC

SEQ ID NO: 601 - protein, 10 aa, Artificial Sequence
  Description of Artificial Sequence: Synthetic peptide
FGGGTKLTVL

SEQ ID NO: 602 - protein, 26 aa, Artificial Sequence [sequence omitted]

SEQ ID NO: 603 - protein, 17 aa, Artificial Sequence
  Description of Artificial Sequence: Synthetic peptide
LAWYQQRPGQAPRLLIY

SEQ ID NO: 604 - protein, 36 aa, Artificial Sequence
  Description of Artificial Sequence: Synthetic polypeptide
TRATAIPARFSGSGSGTEFTLTISRLEPEDFATYYC

SEQ ID NO: 605 - protein, 10 aa, Artificial Sequence
  Description of Artificial Sequence: Synthetic peptide
FGGGTKVEIN

SEQ ID NO: 606 - protein, 25 aa, Artificial Sequence
  Description of Artificial Sequence: Synthetic peptide
QSALTQPPSASGSPGQSVTISCTGT

SEQ ID NO: 607 - protein, 17 aa, Artificial Sequence
  Description of Artificial Sequence: Synthetic peptide
VSWYQQHPGKAPKLLIY

SEQ ID NO: 608 - protein, 36 aa, Artificial Sequence
  Description of Artificial Sequence: Synthetic polypeptide
KRPPGVPDRFSGSKSGNTASLTVSGLQAEDEADYYC

SEQ ID NO: 609 - protein, 10 aa, Artificial Sequence
  Description of Artificial Sequence: Synthetic peptide
FGGGTKLTVL

SEQ ID NO: 610 - protein, 25 aa, Artificial Sequence
  Description of Artificial Sequence: Synthetic peptide
QPGLTQPPSVSKGLRQTATLTCTGN

SEQ ID NO: 611 - protein, 17 aa, Artificial Sequence
  Description of Artificial Sequence: Synthetic peptide
AAWLQQHQGHPPKLLSY

SEQ ID NO: 612 - protein, 36 aa, Artificial Sequence
  Description of Artificial Sequence: Synthetic polypeptide
NRPPGISERFSASRSGNTASLTITGLQPEDEADYYC

SEQ ID NO: 613 - protein, 10 aa, Artificial Sequence
  Description of Artificial Sequence: Synthetic peptide
FGGGTKLSVL

SEQ ID NO: 614 - protein, 25 aa, Artificial Sequence
  Description of Artificial Sequence: Synthetic peptide
NFMLTQPHSVSESPGKTVTISCTGS

SEQ ID NO: 615 - protein, 17 aa, Artificial Sequence
  Description of Artificial Sequence: Synthetic peptide
VQWYQQRPGSAPTTVIY

SEQ ID NO: 616 - protein, 38 aa, Artificial Sequence
  Description of Artificial Sequence: Synthetic polypeptide
QRPSGVPDRFSGSIDSSSNSASLTISGLKTEDEADYYC

SEQ ID NO: 617 - protein, 10 aa, Artificial Sequence
  Description of Artificial Sequence: Synthetic peptide
FGGGTKLTVL

SEQ ID NO: 618 - protein, 25 aa, Artificial Sequence
  Description of Artificial Sequence: Synthetic peptide
NFMLTQPHSVSESPGKTVTISCTGS

SEQ ID NO: 619 - protein, 17 aa, Artificial Sequence
  Description of Artificial Sequence: Synthetic peptide
VQWYQQRPGSAPTTVIY

SEQ ID NO: 620 - protein, 38 aa, Artificial Sequence
  Description of Artificial Sequence: Synthetic polypeptide
QRPSGVPDRFSGSIGSSSNSASLTISGLKTEDEADYYC

SEQ ID NO: 621 - protein, 10 aa, Artificial Sequence
  Description of Artificial Sequence: Synthetic peptide
FGGGTKLTVL

SEQ ID NO: 622 - protein, 25 aa, Artificial Sequence
  Description of Artificial Sequence: Synthetic peptide
QPGLTQPPSVSVAPGQTARISCGGN

SEQ ID NO: 623 - protein, 17 aa, Artificial Sequence
  Description of Artificial Sequence: Synthetic peptide
VHWYQQKPGRAPVLVVY

SEQ ID NO: 624 - protein, 36 aa, Artificial Sequence
  Description of Artificial Sequence: Synthetic polypeptide
GRPSGIPERFSGSNSGNTATLTVSRVEAGDEADYYC

SEQ ID NO: 625 - protein, 10 aa, Artificial Sequence
  Description of Artificial Sequence: Synthetic peptide
FATGTKVSIL

SEQ ID NO: 626 - protein, 25 aa, Artificial Sequence
  Description of Artificial Sequence: Synthetic peptide
QPGLTQPASVSGSPGQSVTISCTGT

SEQ ID NO: 627 - protein, 17 aa, Artificial Sequence
  Description of Artificial Sequence: Synthetic peptide
VSWYQQHPGKAPKLMIY

SEQ ID NO: 628 - protein, 36 aa, Artificial Sequence
  Description of Artificial Sequence: Synthetic polypeptide
KRPSGISNRFSGSKSGNTASLTISGLQAEDEADYFC

SEQ ID NO: 629 - protein, 10 aa, Artificial Sequence
  Description of Artificial Sequence: Synthetic peptide
FGGGTKLTVL

SEQ ID NO: 630 - protein, 25 aa, Artificial Sequence
  Description of Artificial Sequence: Synthetic peptide
QPGLTQPPSASGTPGQRVTISCSGS

SEQ ID NO: 631 - protein, 17 aa, Artificial Sequence
  Description of Artificial Sequence: Synthetic peptide
VNWYQQLPGTAPKLLIY

SEQ ID NO: 632 - protein, 36 aa, Artificial Sequence
  Description of Artificial Sequence: Synthetic polypeptide
QRPSGVPDRFSGSKSGTSASLAISGLRSEDEADYYC

SEQ ID NO: 633 - protein, 10 aa, Artificial Sequence
  Description of Artificial Sequence: Synthetic peptide
FGGGTKLTVL

SEQ ID NO: 634 - protein, 25 aa, Artificial Sequence
  Description of Artificial Sequence: Synthetic peptide
QPVLTQPHSVSESPGKTVTISCTRS

SEQ ID NO: 635 - protein, 17 aa, Artificial Sequence
  Description of Artificial Sequence: Synthetic peptide
VQWYQQRPGSAPTTVIY

SEQ ID NO: 636 - protein, 38 aa, Artificial Sequence
  Description of Artificial Sequence: Synthetic polypeptide
QRPSGVPDRFSGSIDSSSNSASLIISGLMTEDEADYYC

SEQ ID NO: 637 - protein, 10 aa, Artificial Sequence
  Description of Artificial Sequence: Synthetic peptide
FGGGTKLTVL

SEQ ID NO: 638 - protein, 25 aa, Artificial Sequence
  Description of Artificial Sequence: Synthetic peptide
QPGLTQPPSVSVAPGQTATITCGGD

SEQ ID NO: 639 - protein, 17 aa, Artificial Sequence
  Description of Artificial Sequence: Synthetic peptide
VHWYQQKAGQAPVLVVY

SEQ ID NO: 640 - protein, 36 aa, Artificial Sequence
  Description of Artificial Sequence: Synthetic polypeptide
GRPSGIPERFSGSNSGNTATLTISRVEAGDEADYYC

SEQ ID NO: 641 - protein, 10 aa, Artificial Sequence
  Description of Artificial Sequence: Synthetic peptide
FGPGTRLSVL

SEQ ID NO: 642 - protein, 25 aa, Artificial Sequence
  Description of Artificial Sequence: Synthetic peptide
NFMLTQPHSVSESPGKTVLISCTRS

SEQ ID NO: 643 - protein, 17 aa, Artificial Sequence
  Description of Artificial Sequence: Synthetic peptide
VQWYQQRPGSAPTTVIY

SEQ ID NO: 644 - protein, 38 aa, Artificial Sequence; identical to SEQ ID NO: 616
  Description of Artificial Sequence: Synthetic polypeptide

SEQ ID NO: 645 - protein, 10 aa, Artificial Sequence
  Description of Artificial Sequence: Synthetic peptide
FGGGTKLTVL

SEQ ID NO: 646 - protein, 26 aa, Artificial Sequence
  Description of Artificial Sequence: Synthetic peptide
EIVLTQSPATLSVSPGERATLSCRAS

SEQ ID NO: 647 - protein, 17 aa, Artificial Sequence
  Description of Artificial Sequence: Synthetic peptide
LPWYQQKPGQAPRLLMY

SEQ ID NO: 648 - protein, 36 aa, Artificial Sequence
  Description of Artificial Sequence: Synthetic polypeptide
TRATGIPPRFSGSGSGTEFSLTISSLQSEDFAVYYC

SEQ ID NO: 649 - protein, 10 aa, Artificial Sequence
  Description of Artificial Sequence: Synthetic peptide
FDGGTNVEIK

SEQ ID NO: 650 - protein, 25 aa, Artificial Sequence
  Description of Artificial Sequence: Synthetic peptide
NFMLTQPHSVSESPGKTITISCTRT

SEQ ID NO: 651 - protein, 17 aa, Artificial Sequence
  Description of Artificial Sequence: Synthetic peptide
VQWYQQRPGSFPITVIY

SEQ ID NO: 652 - protein, 38 aa, Artificial Sequence
  Description of Artificial Sequence: Synthetic polypeptide
QRPSGVPYRFSGSIDRSSNSAALTISDLKTEDEADYYC

SEQ ID NO: 653 - protein, 10 aa, Artificial Sequence
  Description of Artificial Sequence: Synthetic peptide
FGGGTKLTVL

SEQ ID NO: 654 - protein, 25 aa, Artificial Sequence
  Description of Artificial Sequence: Synthetic peptide
QSALTQPASVSGSPGQSITISCTGT

SEQ ID NO: 655 - protein, 17 aa, Artificial Sequence
  Description of Artificial Sequence: Synthetic peptide
VSWYQQHPGKAPKLMIY

SEQ ID NO: 656 - protein, 36 aa, Artificial Sequence
  Description of Artificial Sequence: Synthetic polypeptide
KRPSGVPDRFSGSKSGNTASLTISGLQAEDEADYYC

SEQ ID NO: 657 - protein, 10 aa, Artificial Sequence
  Description of Artificial Sequence: Synthetic peptide
FGTGTKVTVL

SEQ ID NO: 658 - protein, 25 aa, Artificial Sequence
  Description of Artificial Sequence: Synthetic peptide
SYELTQPPSVSVAPGQTARITCGGD

SEQ ID NO: 659 - protein, 17 aa, Artificial Sequence
  Description of Artificial Sequence: Synthetic peptide
VHWYQQKSGQAPVLVVY

SEQ ID NO: 660 - protein, 36 aa, Artificial Sequence
  Description of Artificial Sequence: Synthetic polypeptide
DRPSGIPERFSGSNSGNTATLTISRVEAGDEADYYC

SEQ ID NO: 661 - protein, 10 aa, Artificial Sequence
  Description of Artificial Sequence: Synthetic peptide
FGGGTKLTVL

SEQ ID NO: 662 - protein, 25 aa, Artificial Sequence
  Description of Artificial Sequence: Synthetic peptide
SSELTQDPAVSVALGQTVKITCQGD

SEQ ID NO: 663 - protein, 17 aa, Artificial Sequence
  Description of Artificial Sequence: Synthetic peptide
ASWYQQKPGQAPVRVIY

SEQ ID NO: 664 - protein, 36 aa, Artificial Sequence
  Description of Artificial Sequence: Synthetic polypeptide
NRPSGIPDRFSGSSSGNTASLTITGAQAEDEADYYC

SEQ ID NO: 665 - protein, 10 aa, Artificial Sequence
  Description of Artificial Sequence: Synthetic peptide
FGGGTKLAVL

SEQ ID NO: 666 - protein, 25 aa, Artificial Sequence
  Description of Artificial Sequence: Synthetic peptide
QSALTQPPSASGSPGQSLTISCTGT

SEQ ID NO: 667 - protein, 17 aa, Artificial Sequence
  Description of Artificial Sequence: Synthetic peptide
VSWYQHHPDKAPKLLIY

SEQ ID NO: 668 - protein, 36 aa, Artificial Sequence
  Description of Artificial Sequence: Synthetic polypeptide
NRPSGVSSRFSGSKSGNTASLTISGLQAEDEADYYC

SEQ ID NO: 669 - protein, 10 aa, Artificial Sequence
  Description of Artificial Sequence: Synthetic peptide
FGTGTEVTPR

SEQ ID NO: 670 - protein, 25 aa, Artificial Sequence
  Description of Artificial Sequence: Synthetic peptide
LPVLTQPPSVSVAPGQTASITCGGD

SEQ ID NO: 671 - protein, 17 aa, Artificial Sequence
  Description of Artificial Sequence: Synthetic peptide
VHWYQQKPGQAPLLVIY

SEQ ID NO: 672 - protein, 36 aa, Artificial Sequence
  Description of Artificial Sequence: Synthetic polypeptide
DRPSGIPERFSGSSSGNTATLTISRVEAGDEADYYC

SEQ ID NO: 673 - protein, 10 aa, Artificial Sequence
  Description of Artificial Sequence: Synthetic peptide
FGGGTTLTVL

SEQ ID NO: 674 - protein, 25 aa, Artificial Sequence
  Description of Artificial Sequence: Synthetic peptide
QSALTQPRSVSGSPGQSVTISCTGT

SEQ ID NO: 675 - protein, 17 aa, Artificial Sequence
  Description of Artificial Sequence: Synthetic peptide
VSWYQQHPGKAPKLIIY

SEQ ID NO: 676 - protein, 36 aa, Artificial Sequence
  Description of Artificial Sequence: Synthetic polypeptide
KRPSGVPDRFSGSKSGNTASLTVSGLQAEDEADYYC

SEQ ID NO: 677 - protein, 10 aa, Artificial Sequence
  Description of Artificial Sequence: Synthetic peptide
FGGGTKLTVL

SEQ ID NO: 678 - protein, 25 aa, Artificial Sequence
  Description of Artificial Sequence: Synthetic peptide
QSVLTQPPSASGSPGQSVTISCTGT

SEQ ID NO: 679 - protein, 17 aa, Artificial Sequence
  Description of Artificial Sequence: Synthetic peptide
VSWYQQHPGKAPKLMIY

SEQ ID NO: 680 - protein, 36 aa, Artificial Sequence
  Description of Artificial Sequence: Synthetic polypeptide
RRPSGVSSRFSGSKSGNTASLTISGLQAEDEADYYC

SEQ ID NO: 681 - protein, 10 aa, Artificial Sequence
  Description of Artificial Sequence: Synthetic peptide
FGTGTKVTVL

SEQ ID NO: 682 - protein, 25 aa, Artificial Sequence
  Description of Artificial Sequence: Synthetic peptide
NFMLTQPHSVSESPGKTVTISCTGS

SEQ ID NO: 683 - protein, 17 aa, Artificial Sequence
  Description of Artificial Sequence: Synthetic peptide
VQWYQQRPGSAPTTVIY

SEQ ID NO: 684 - protein, 38 aa, Artificial Sequence; identical to SEQ ID NO: 616
  Description of Artificial Sequence: Synthetic polypeptide

SEQ ID NO: 685 - protein, 10 aa, Artificial Sequence
  Description of Artificial Sequence: Synthetic peptide
FGGGTKLTVL

SEQ ID NO: 686 - protein, 25 aa, Artificial Sequence
  Description of Artificial Sequence: Synthetic peptide
QPGLTQTPSPSGTPGQRVTISCSGS

SEQ ID NO: 687 - protein, 17 aa, Artificial Sequence
  Description of Artificial Sequence: Synthetic peptide
VTWYQQLPGTAPKLLIY

SEQ ID NO: 688 - protein, 36 aa, Artificial Sequence
  Description of Artificial Sequence: Synthetic polypeptide
QRPSGVPDRFSASRSGTSPSLAITGLQAEDEADYYC

SEQ ID NO: 689 - protein, 10 aa, Artificial Sequence
  Description of Artificial Sequence: Synthetic peptide
FGGGTKMTVL

SEQ ID NO: 690 - protein, 25 aa, Artificial Sequence
  Description of Artificial Sequence: Synthetic peptide
LPVLTQPPSASGTPGQRVTISCSGS

SEQ ID NO: 691 - protein, 17 aa, Artificial Sequence
  Description of Artificial Sequence: Synthetic peptide
VNWYHQLPRTAPKLLIY

SEQ ID NO: 692 - protein, 36 aa, Artificial Sequence
  Description of Artificial Sequence: Synthetic polypeptide
HRPSGVPDRFSGSQSGTSASLAITVIQSEDEADYYC

SEQ ID NO: 693 - protein, 10 aa, Artificial Sequence
  Description of Artificial Sequence: Synthetic peptide
FGSGTKVTVL

SEQ ID NO: 694 - protein, 25 aa, Artificial Sequence
  Description of Artificial Sequence: Synthetic peptide
LPVLTQPPSASGTPGQRVTISCSGS

SEQ ID NO: 695 - protein, 17 aa, Artificial Sequence
  Description of Artificial Sequence: Synthetic peptide
VNWYHYLPRTAPKLLIY

SEQ ID NO: 696 - protein, 36 aa, Artificial Sequence
  Description of Artificial Sequence: Synthetic polypeptide
HRASRVPDRFSGSQSGTSASLAITVIQSEDEADYYC

SEQ ID NO: 697 - protein, 10 aa, Artificial Sequence
  Description of Artificial Sequence: Synthetic peptide
FGSGTKVTVL

SEQ ID NO: 698 - protein, 25 aa, Artificial Sequence
  Description of Artificial Sequence: Synthetic peptide
LPVLTQPPSASGTPGQRVTISCSGS

SEQ ID NO: 699 - protein, 17 aa, Artificial Sequence
  Description of Artificial Sequence: Synthetic peptide
VNWYQQLPGTAPKLLIY

SEQ ID NO: 700 - protein, 36 aa, Artificial Sequence
  Description of Artificial Sequence: Synthetic polypeptide
QRPSRVPDRFSGSKTGTSPSLAISVLQSEDEADYYC

SEQ ID NO: 701 - protein, 10 aa, Artificial Sequence
  Description of Artificial Sequence: Synthetic peptide
FGSGTKSPSY

SEQ ID NO: 702 - protein, 25 aa, Artificial Sequence
  Description of Artificial Sequence: Synthetic peptide
QPVLTQPPSASGTPGQRVTISCSGS

SEQ ID NO: 703 - protein, 17 aa, Artificial Sequence
  Description of Artificial Sequence: Synthetic peptide
VNWYQQLPGTAPKLLIY

SEQ ID NO: 704 - protein, 36 aa, Artificial Sequence; identical to SEQ ID NO: 544
  Description of Artificial Sequence: Synthetic polypeptide

SEQ ID NO: 705 - protein, 10 aa, Artificial Sequence
  Description of Artificial Sequence: Synthetic peptide
FGGGTKLTVL

SEQ ID NO: 706 - protein, 25 aa, Artificial Sequence
  Description of Artificial Sequence: Synthetic peptide
SSELTQDPAVSVALGQTVRITCQGD

SEQ ID NO: 707 - protein, 17 aa, Artificial Sequence
  Description of Artificial Sequence: Synthetic peptide
ASWYQQKPGQAPVLVIY

SEQ ID NO: 708 - protein, 36 aa, Artificial Sequence; identical to SEQ ID NO: 664
  Description of Artificial Sequence: Synthetic polypeptide

SEQ ID NO: 709 - protein, 10 aa, Artificial Sequence
  Description of Artificial Sequence: Synthetic peptide
FGGGTKLTVL

SEQ ID NO: 710 - protein, 25 aa, Artificial Sequence
  Description of Artificial Sequence: Synthetic peptide
QPVLTQPPSASGTPGQRVTISCSGS

SEQ ID NO: 711 - protein, 17 aa, Artificial Sequence
  Description of Artificial Sequence: Synthetic peptide
VNWYQQLPGTAPKLLIY

SEQ ID NO: 712 - protein, 36 aa, Artificial Sequence
  Description of Artificial Sequence: Synthetic polypeptide
QRYPGVPDRFSGSKSGTSASLAISGLRSEDEADYYC

SEQ ID NO: 713 - protein, 10 aa, Artificial Sequence
  Description of Artificial Sequence: Synthetic peptide
FGGGTKLTVL

SEQ ID NO: 714 - protein, 25 aa, Artificial Sequence
  Description of Artificial Sequence: Synthetic peptide
QPGLTQPPSASGTPGQGVTISCSGS

SEQ ID NO: 715 - protein, 17 aa, Artificial Sequence
  Description of Artificial Sequence: Synthetic peptide
VHWYQQLPGTAPKLLIY

SEQ ID NO: 716 - protein, 36 aa, Artificial Sequence; identical to SEQ ID NO: 632
  Description of Artificial Sequence: Synthetic polypeptide

SEQ ID NO: 717 - protein, 10 aa, Artificial Sequence
  Description of Artificial Sequence: Synthetic peptide
FGGGTKLTVL

SEQ ID NO: 718 - protein, 25 aa, Artificial Sequence
  Description of Artificial Sequence: Synthetic peptide
NFMLTQPHSVSESPGKTVTISCTGS

SEQ ID NO: 719 - protein, 17 aa, Artificial Sequence
  Description of Artificial Sequence: Synthetic peptide
VQWLQQRLGSAPTTVIY

SEQ ID NO: 720 - protein, 38 aa, Artificial Sequence; identical to SEQ ID NO: 616
  Description of Artificial Sequence: Synthetic polypeptide

SEQ ID NO: 721 - protein, 10 aa, Artificial Sequence
  Description of Artificial Sequence: Synthetic peptide
FGGGTKLTVL

SEQ ID NO: 722 - protein, 122 aa, Artificial Sequence
  Description of Artificial Sequence: Synthetic polypeptide
QVTLKESGPKLVKPTQTLTLTCTFSGFSLSTSGVGVGWIRQPPGKALEWLALIYWDDDKRYSPSLKSRLTIAKDTSKYQVVLTMTNMDPVDTATYYCARISGSGYFYPFDIWGQGTMVTVSA

SEQ ID NO: 723 - protein, 111 aa, Artificial Sequence
  Description of Artificial Sequence: Synthetic polypeptide
NFMLTQPHSVSESPGKTVTISCTRSSGSIASNYVQWYQQRPGSAPTTVIYEDNQRPSGVPDRFSGSIDSSSNSASLTISGLKTEDEADYYCQSYDSSNLWVFGGGTKLTVL

SEQ ID NO: 724 - protein, 119 aa, Artificial Sequence
  Description of Artificial Sequence: Synthetic polypeptide
QVQLQQSGPGLVKPSQTLSLTCAISGDSVSSNSAAWNWIRQSPARGLEWLGRTYYRSRWYNDYAISMKSRITINPDTSKNQFSLQLESVTPEDTAVYYCAREIRGFDYWGQGTLVTVSS

SEQ ID NO: 725 - protein, 112 aa, Artificial Sequence
  Description of Artificial Sequence: Synthetic polypeptide
QSVLTQPPSASGSPGQSVTISCTGTSSDVGAYNFVSWYQHHPGKAPKLIIYDFNKRPSGVPDRFSGSKSGNTASLTVSGLQADDEADYYCSSYAGSNNFDVVFGGGTKLTVL

SEQ ID NO: 726 - protein, 118 aa, Artificial Sequence
  Description of Artificial Sequence: Synthetic polypeptide
QVQLVQSGGGLVKPGRSLRLSCTASGFTFGDYAMSWFRQAPGKGLEWVGFIRSKAYGGTTGYAASVKGRFTISRDDSKSIAYLQMNSLKTEDTAVYYCTTADDDMDVWGKGTTVTVSS

SEQ ID NO: 727 - protein, 111 aa, Artificial Sequence
  Description of Artificial Sequence: Synthetic polypeptide
NFMLTQPHSVSESPGKTVTISCTRSSGTIASNYVQWYQQRPGSAPTTVIYEDNQRPSGVPDRFSGSIDRSSNSASLTISGLTPDDEADYYCQSYDTSNHYVFGTGTKVTVL

SEQ ID NO: 728 - protein, 122 aa, Artificial Sequence
  Description of Artificial Sequence: Synthetic polypeptide
QVQLVQSGGGVVQPGRSLRLSCAASGFTFSNYGMHWVRQAPGKGLEWVALIWERGSKKDYADSVKGRFTVSRDNSKNTLYLQMNSLRPEDTAVYFCAREGISMTGAEYFQHWGQGTLVTVSS

SEQ ID NO: 729 - protein, 112 aa, Artificial Sequence
  Description of Artificial Sequence: Synthetic polypeptide
QSVLTQPPSVSGSPGQRVTMSCTGSSSNIGAGYDVHWYQQVPGAAPRLLIYGTNNRPSGVPDRFSGSKSGTSASLTITGLQAEDEADYYCQSYDNSLTDPYVFGTGTKVTVL

SEQ ID NO: 730 - protein, 124 aa, Artificial Sequence
  Description of Artificial Sequence: Synthetic polypeptide
QVQLVQSGGGVVQPGRSLRLSCAASGFTFDDYAMHWVRQVPGKGLEWVSGIDWNSGVIGYADSVKGRFTISRDNVKNSLYLQMNSLRTEDSALYYCAKDIGPGGSGSYYAFDIWGQGTTVTVSS

SEQ ID NO: 731 - protein, 111 aa, Artificial Sequence
  Description of Artificial Sequence: Synthetic polypeptide
QSALTQPASVSGSPGQSITISCTGTSSDVGGSKYVSWYQQHPGKAPKVMIYDVTKRPSGVPDRFSGSKSGNTASLTISGLQAEDEADYYCAAWDDSLNGVVFGGGTKLTVL

SEQ ID NO: 732 - protein, 119 aa, Artificial Sequence
  Description of Artificial Sequence: Synthetic polypeptide
EVQLVQSGGGVVQPGRSLRVSCAASGFSFSRYGMHWVRQAPGKGLEWVAFIRHDGSKKYYADSVEGRFTISRDNSRNTVSLEMNSLRGEDTAVYYCAKDGRLEAALDDWGQGTLVTVSS

SEQ ID NO: 733 - protein, 110 aa, Artificial Sequence
  Description of Artificial Sequence: Synthetic polypeptide
NFMLTQPHSMSGSAGKTVTVSCIRSSGSIANNFVQWYQQRPGSAPTTVIYEDNQRPSGVPDRFSGSIDSSSNSASLTISGLKTEDEADYYCQSYDSSNLVFGGGTRLTVL

SEQ ID NO: 734 - protein, 118 aa, Artificial Sequence
  Description of Artificial Sequence: Synthetic polypeptide
EVQLVESGAEVKKPGESLKISCKGSGYSFTSYWIGWVRQMPGKGLEWMGIIYPGDSDTRYSPSFQGQVTISADKSISTAYLQWSSLKASDTAMYYCARRGDLDAFDIWGQGTMVTVSS

SEQ ID NO: 735 - protein, 110 aa, Artificial Sequence
  Description of Artificial Sequence: Synthetic polypeptide
QPGLTQPPAASGTPGQRVTVSCSGASANIGSNAVSWFKQFPETAPRLLISGNTHRPSGVPDRVSGSKSGTSASLTISGLQSDDEADYYCAAWDDSLNGYVFGSGTKVTVL

SEQ ID NO: 736 - protein, 120 aa, Artificial Sequence
  Description of Artificial Sequence: Synthetic polypeptide
QVQLVQSGGGSVKPGGSLRLSCAASGYRLSDYYMHWVRQAPGKGLEWVANIKQDGSEKYYVDSVKGRFTISRDNAKNSLYLQMNSLRAEDTAVYYCARVRGWSRGYFDYWGQGTLVTVSS

SEQ ID NO: 737 - protein, 111 aa, Artificial Sequence
  Description of Artificial Sequence: Synthetic polypeptide
NFMLTQPHSVSESPGKTVTISCTGSSGSIASNYVQWYQQRPGSAPTTVIYEDNQRPSGVPDRFSGSIDSSSNSASLLISGLKTEDEADYYCQSYDSSNHWVFGGGTKLTVL

SEQ ID NO: 738 - protein, 117 aa, Artificial Sequence; identical to SEQ ID NO: 69
  Description of Artificial Sequence: Synthetic polypeptide

SEQ ID NO: 739 - protein, 110 aa, Artificial Sequence; identical to SEQ ID NO: 70
  Description of Artificial Sequence: Synthetic polypeptide

SEQ ID NO: 740 - protein, 127 aa, Artificial Sequence; identical to SEQ ID NO: 9
  Description of Artificial Sequence: Synthetic polypeptide

SEQ ID NO: 741 - protein, 111 aa, Artificial Sequence; identical to SEQ ID NO: 10
  Description of Artificial Sequence: Synthetic polypeptide

SEQ ID NO: 742 - protein, 119 aa, Artificial Sequence
  Description of Artificial Sequence: Synthetic polypeptide
EVQLVQSGAEVKKPGSSVKVSCRSSGGTFSTYGITWVRQAPGQGLEWMGRIIPSLGIPNYAQKFQGRVTITADTSVSTAWMELSSLESDDTAIYYCARENIDLATNDFWGQGTLVTVSS

SEQ ID NO: 743 - protein, 112 aa, Artificial Sequence
  Description of Artificial Sequence: Synthetic polypeptide
QSALTQPPSASGSPGQSVTISCTGTSRDIGAYGYVSWYQQVPGKAPKLIIYEVRNRPSGVSSRFSGSKSGNTASLTISGLQAEDEADYYCSSYTSSSTLDVVFGGGTKLTVL

SEQ ID NO: 744 - protein, 116 aa, Artificial Sequence
  Description of Artificial Sequence: Synthetic polypeptide
QVQLVQSGAEVKTPGSSVKVSCKASGGTFSSSGVSWVRQAPGQGLEWMGGIIPMLGTPNYAQKFQGRITITADEATSTVYMALSSLRSEDTAMYYCARDGGNYDYWGQGTLVTVSS

SEQ ID NO: 745 - protein, 110 aa, Artificial Sequence
  Description of Artificial Sequence: Synthetic polypeptide
QPVLTQPPSASGTPGQRVSISCSGSSSNIGRNAVDWYHQVPGTAPQLLIYSNNERSSGVPDRFSASRSGNTASLTIIGLQPEDEADYYCSAWDTSLSTWVFGGGTKLTVL

SEQ ID NO: 746 - protein, 119 aa, Artificial Sequence; identical to SEQ ID NO: 39
  Description of Artificial Sequence: Synthetic polypeptide

SEQ ID NO: 747 - protein, 111 aa, Artificial Sequence; identical to SEQ ID NO: 40
  Description of Artificial Sequence: Synthetic polypeptide

SEQ ID NO: 748 - protein, 122 aa, Artificial Sequence; identical to SEQ ID NO: 41
  Description of Artificial Sequence: Synthetic polypeptide

SEQ ID NO: 749 - protein, 108 aa, Artificial Sequence; identical to SEQ ID NO: 68
  Description of Artificial Sequence: Synthetic polypeptide

SEQ ID NO: 750 - protein, 121 aa, Artificial Sequence; identical to SEQ ID NO: 23
  Description of Artificial Sequence: Synthetic polypeptide

SEQ ID NO: 751 - protein, 110 aa, Artificial Sequence; identical to SEQ ID NO: 24
  Description of Artificial Sequence: Synthetic polypeptide

SEQ ID NO: 752 - protein, 118 aa, Artificial Sequence; identical to SEQ ID NO: 73
  Description of Artificial Sequence: Synthetic polypeptide

SEQ ID NO: 753 - protein, 111 aa, Artificial Sequence; identical to SEQ ID NO: 74
  Description of Artificial Sequence: Synthetic polypeptide

SEQ ID NO: 754 - protein, 10 aa, Artificial Sequence
  Description of Artificial Sequence: Synthetic peptide
GFSLSTSGVG

SEQ ID NO: 755 - protein, 7 aa, Artificial Sequence
  Description of Artificial Sequence: Synthetic peptide
IYWDDDK

SEQ ID NO: 756 - protein, 14 aa, Artificial Sequence
  Description of Artificial Sequence: Synthetic peptide
ARISGSGYFYPFDI

SEQ ID NO: 757 - protein, 10 aa, Artificial Sequence
  Description of Artificial Sequence: Synthetic peptide
GDSVSSNSAA

SEQ ID NO: 758 - protein, 9 aa, Artificial Sequence
  Description of Artificial Sequence: Synthetic peptide
TYYRSRWYN

SEQ ID NO: 759 - protein, 9 aa, Artificial Sequence
  Description of Artificial Sequence: Synthetic peptide
AREIRGFDY

SEQ ID NO: 760 - protein, 8 aa, Artificial Sequence
  Description of Artificial Sequence: Synthetic peptide
GFTFGDYA

SEQ ID NO: 761 - protein, 10 aa, Artificial Sequence
  Description of Artificial Sequence: Synthetic peptide
IRSKAYGGTT

SEQ ID NO: 762 - protein, 9 aa, Artificial Sequence
  Description of Artificial Sequence: Synthetic peptide
TTADDDMDV

SEQ ID NO: 763 - protein, 8 aa, Artificial Sequence
  Description of Artificial Sequence: Synthetic peptide
GFTFSNYG

SEQ ID NO: 764 - protein, 8 aa, Artificial Sequence
  Description of Artificial Sequence: Synthetic peptide
IWERGSKK

SEQ ID NO: 765 - protein, 15 aa, Artificial Sequence
  Description of Artificial Sequence: Synthetic peptide
AREGISMTGAEYFQH

SEQ ID NO: 766 - protein, 8 aa, Artificial Sequence
  Description of Artificial Sequence: Synthetic peptide
GFTFDDYA

SEQ ID NO: 767 - protein, 8 aa, Artificial Sequence
  Description of Artificial Sequence: Synthetic peptide
IDWNSGVI

SEQ ID NO: 768 - protein, 17 aa, Artificial Sequence
  Description of Artificial Sequence: Synthetic peptide
AKDIGPGGSGSYYAFDI

SEQ ID NO: 769 - protein, 8 aa, Artificial Sequence
  Description of Artificial Sequence: Synthetic peptide
GFSFSRYG

SEQ ID NO: 770 - protein, 8 aa, Artificial Sequence
  Description of Artificial Sequence: Synthetic peptide
IRHDGSKK

SEQ ID NO: 771 - protein, 12 aa, Artificial Sequence
  Description of Artificial Sequence: Synthetic peptide
AKDGRLEAALDD

SEQ ID NO: 772 - protein, 8 aa, Artificial Sequence
  Description of Artificial Sequence: Synthetic peptide
GYSFTSYW

SEQ ID NO: 773 - protein, 8 aa, Artificial Sequence
  Description of Artificial Sequence: Synthetic peptide
IYPGDSDT

SEQ ID NO: 774 - protein, 11 aa, Artificial Sequence
  Description of Artificial Sequence: Synthetic peptide
ARRGDLDAFDI

SEQ ID NO: 775 - protein, 8 aa, Artificial Sequence
  Description of Artificial Sequence: Synthetic peptide
GYRLSDYY

SEQ ID NO: 776 - protein, 8 aa, Artificial Sequence
  Description of Artificial Sequence: Synthetic peptide
IKQDGSEK

SEQ ID NO: 777 - protein, 13 aa, Artificial Sequence
  Description of Artificial Sequence: Synthetic peptide
ARVRGWSRGYFDY

SEQ ID NO: 778 - protein, 8 aa, Artificial Sequence
  Description of Artificial Sequence: Synthetic peptide
GFTFDDYA

SEQ ID NO: 779 - protein, 8 aa, Artificial Sequence
  Description of Artificial Sequence: Synthetic peptide
ISWNSGSI

SEQ ID NO: 780 - protein, 10 aa, Artificial Sequence
  Description of Artificial Sequence: Synthetic peptide
ARDWWGSIDH

SEQ ID NO: 781 - protein, 8 aa, Artificial Sequence
  Description of Artificial Sequence: Synthetic peptide
GFTFSHYD

SEQ ID NO: 782 - protein, 8 aa, Artificial Sequence
  Description of Artificial Sequence: Synthetic peptide
IGYDGTNL

SEQ ID NO: 783 - protein, 20 aa, Artificial Sequence
  Description of Artificial Sequence: Synthetic peptide
ARAANYYDSSGYGRADAFDI

SEQ ID NO: 784 - protein, 8 aa, Artificial Sequence
  Description of Artificial Sequence: Synthetic peptide
GGTFSTYG

SEQ ID NO: 785 - protein, 8 aa, Artificial Sequence
  Description of Artificial Sequence: Synthetic peptide
IIPSLGIP

SEQ ID NO: 786 - protein, 12 aa, Artificial Sequence
  Description of Artificial Sequence: Synthetic peptide
ARENIDLATNDF

SEQ ID NO: 787 - protein, 8 aa, Artificial Sequence
  Description of Artificial Sequence: Synthetic peptide
GGTFSSSG

SEQ ID NO: 788 - protein, 8 aa, Artificial Sequence
  Description of Artificial Sequence: Synthetic peptide
IIPMLGTP

SEQ ID NO: 789 - protein, 9 aa, Artificial Sequence
  Description of Artificial Sequence: Synthetic peptide
ARDGGNYDY

SEQ ID NO: 790 - protein, 8 aa, Artificial Sequence
  Description of Artificial Sequence: Synthetic peptide
GFTFSSYW

SEQ ID NO: 791 - protein, 8 aa, Artificial Sequence
  Description of Artificial Sequence: Synthetic peptide
IKQDGSEK

SEQ ID NO: 792 - protein, 12 aa, Artificial Sequence
  Description of Artificial Sequence: Synthetic peptide
ARGFYYYGAFDI

SEQ ID NO: 793 - protein, 8 aa, Artificial Sequence
  Description of Artificial Sequence: Synthetic peptide
GFTFDDYA

SEQ ID NO: 794 - protein, 8 aa, Artificial Sequence
  Description of Artificial Sequence: Synthetic peptide
IDWNSGVI

SEQ ID NO: 795 - protein, 15 aa, Artificial Sequence
  Description of Artificial Sequence: Synthetic peptide
AKDAYSYGFLGAFDI

SEQ ID NO: 796 - protein, 8 aa, Artificial Sequence
  Description of Artificial Sequence: Synthetic peptide
GYSFTGSH

SEQ ID NO: 797 - protein, 8 aa, Artificial Sequence
  Description of Artificial Sequence: Synthetic peptide
INPDSGVI

SEQ ID NO: 798 - protein, 14 aa, Artificial Sequence
  Description of Artificial Sequence: Synthetic peptide
ARDKAIGYVWALDY

SEQ ID NO: 799 - protein, 8 aa, Artificial Sequence
  Description of Artificial Sequence: Synthetic peptide
GASISNSF

SEQ ID NO: 800 - protein, 7 aa, Artificial Sequence
  Description of Artificial Sequence: Synthetic peptide
TSYSGNS

SEQ ID NO: 801 - protein, 12 aa, Artificial Sequence
  Description of Artificial Sequence: Synthetic peptide
ARREWIKGHFDY

SEQ ID NO: 802 - protein, 8 aa, Artificial Sequence
  Description of Artificial Sequence: Synthetic peptide
SGSIASNY

SEQ ID NO: 803 - protein, 3 aa, Artificial Sequence
  Description of Artificial Sequence: Synthetic peptide
EDN

SEQ ID NO: 804 - protein, 10 aa, Artificial Sequence
  Description of Artificial Sequence: Synthetic peptide
QSYDSSNLWV

SEQ ID NO: 805 - protein, 9 aa, Artificial Sequence
  Description of Artificial Sequence: Synthetic peptide
SSDVGAYNF

SEQ ID NO: 806 - protein, 3 aa, Artificial Sequence
  Description of Artificial Sequence: Synthetic peptide
DFN

SEQ ID NO: 807 - protein, 12 aa, Artificial Sequence
  Description of Artificial Sequence: Synthetic peptide
SSYAGSNNFDVV

SEQ ID NO: 808 - protein, 8 aa, Artificial Sequence
  Description of Artificial Sequence: Synthetic peptide
SGTIASNY

SEQ ID NO: 809 - protein, 3 aa, Artificial Sequence
  Description of Artificial Sequence: Synthetic peptide
EDN

SEQ ID NO: 810 - protein, 10 aa, Artificial Sequence
  Description of Artificial Sequence: Synthetic peptide
QSYDTSNHYV

SEQ ID NO: 811 - protein, 9 aa, Artificial Sequence
  Description of Artificial Sequence: Synthetic peptide
SSNIGAGYD

SEQ ID NO: 812 - protein, 3 aa, Artificial Sequence
  Description of Artificial Sequence: Synthetic peptide
GTN

SEQ ID NO: 813 - protein, 12 aa, Artificial Sequence
  Description of Artificial Sequence: Synthetic peptide
QSYDNSLTDPYV

SEQ ID NO: 814 - protein, 9 aa, Artificial Sequence
  Description of Artificial Sequence: Synthetic peptide
SSDVGGSKY

SEQ ID NO: 815 - protein, 3 aa, Artificial Sequence
  Description of Artificial Sequence: Synthetic peptide
DVT

SEQ ID NO: 816 - protein, 11 aa, Artificial Sequence
  Description of Artificial Sequence: Synthetic peptide
AAWDDSLNGVV

SEQ ID NO: 817 - protein, 8 aa, Artificial Sequence
  Description of Artificial Sequence: Synthetic peptide
SGSIANNF

SEQ ID NO: 818 - protein, 3 aa, Artificial Sequence
  Description of Artificial Sequence: Synthetic peptide
EDN

SEQ ID NO: 819 - protein, 9 aa, Artificial Sequence
  Description of Artificial Sequence: Synthetic peptide
QSYDSSNLV

SEQ ID NO: 820 - protein, 8 aa, Artificial Sequence
  Description of Artificial Sequence: Synthetic peptide
SANIGSNA

SEQ ID NO: 821 - protein, 3 aa, Artificial Sequence
  Description of Artificial Sequence: Synthetic peptide
GNT

SEQ ID NO: 822 - protein, 11 aa, Artificial Sequence
  Description of Artificial Sequence: Synthetic peptide
AAWDDSLNGYV

SEQ ID NO: 823 - protein, 8 aa, Artificial Sequence
  Description of Artificial Sequence: Synthetic peptide
SGSIASNY

SEQ ID NO: 824 - protein, 3 aa, Artificial Sequence
  Description of Artificial Sequence: Synthetic peptide
EDN

SEQ ID NO: 825 - protein, 10 aa, Artificial Sequence
  Description of Artificial Sequence: Synthetic peptide
QSYDSSNHWV

SEQ ID NO: 826 - protein, 9 aa, Artificial Sequence
  Description of Artificial Sequence: Synthetic peptide
SSDVGGYDY

SEQ ID NO: 827 - protein, 3 aa, Artificial Sequence
  Description of Artificial Sequence: Synthetic peptide
DVS

SEQ ID NO: 828 - protein, 10 aa, Artificial Sequence
  Description of Artificial Sequence: Synthetic peptide
SSYTSSSPVV

SEQ ID NO: 829 - protein, 8 aa, Artificial Sequence
  Description of Artificial Sequence: Synthetic peptide
TGSIAGNY

SEQ ID NO: 830 - protein, 3 aa, Artificial Sequence
  Description of Artificial Sequence: Synthetic peptide
DDN

SEQ ID NO: 831 - protein, 10 aa, Artificial Sequence
  Description of Artificial Sequence: Synthetic peptide
QSYDSGNRGV

SEQ ID NO: 832 - protein, 9 aa, Artificial Sequence
  Description of Artificial Sequence: Synthetic peptide
SRDIGAYGY

SEQ ID NO: 833 - protein, 3 aa, Artificial Sequence
  Description of Artificial Sequence: Synthetic peptide
EVR

SEQ ID NO: 834 - protein, 12 aa, Artificial Sequence
  Description of Artificial Sequence: Synthetic peptide
SSYTSSSTLDVV

SEQ ID NO: 835 - protein, 8 aa, Artificial Sequence
  Description of Artificial Sequence: Synthetic peptide
SSNIGRNA

SEQ ID NO: 836 - protein, 3 aa, Artificial Sequence
  Description of Artificial Sequence: Synthetic peptide
SNN

SEQ ID NO: 837 - protein, 11 aa, Artificial Sequence
  Description of Artificial Sequence: Synthetic peptide
SAWDTSLSTWV

SEQ ID NO: 838 - protein, 8 aa, Artificial Sequence
  Description of Artificial Sequence: Synthetic peptide
SGSIASNY

SEQ ID NO: 839 - protein, 3 aa, Artificial Sequence
  Description of Artificial Sequence: Synthetic peptide
EDN

SEQ ID NO: 840 - protein, 10 aa, Artificial Sequence
  Description of Artificial Sequence: Synthetic peptide
QSYDSSNHWV

SEQ ID NO: 841 - protein, 6 aa, Artificial Sequence
  Description of Artificial Sequence: Synthetic peptide
NIRTKG

SEQ ID NO: 842 - protein, 3 aa, Artificial Sequence
  Description of Artificial Sequence: Synthetic peptide
YAS

SEQ ID NO: 843 - protein, 11 aa, Artificial Sequence
  Description of Artificial Sequence: Synthetic peptide
QVWDSSSDLVV

SEQ ID NO: 844 - protein, 9 aa, Artificial Sequence
  Description of Artificial Sequence: Synthetic peptide
SSDVGTYNR

SEQ ID NO: 845 - protein, 3 aa, Artificial Sequence
  Description of Artificial Sequence: Synthetic peptide
EVS

SEQ ID NO: 846 - protein, 10 aa, Artificial Sequence
  Description of Artificial Sequence: Synthetic peptide
SSYTRTFTYV

SEQ ID NO: 847 - protein, 8 aa, Artificial Sequence
  Description of Artificial Sequence: Synthetic peptide
GGSIASNY

SEQ ID NO: 848 - protein, 3 aa, Artificial Sequence
  Description of Artificial Sequence: Synthetic peptide
EDN

SEQ ID NO: 849 - protein, 10 aa, Artificial Sequence
  Description of Artificial Sequence: Synthetic peptide
QSYDSSNPVV

SEQ ID NO: 850 - protein, 25 aa, Artificial Sequence
  Description of Artificial Sequence: Synthetic peptide
QVTLKESGPKLVKPTQTLTLTCTFS

SEQ ID NO: 851 - protein, 17 aa, Artificial Sequence
  Description of Artificial Sequence: Synthetic peptide
VGWIRQPPGKALEWLAL

SEQ ID NO: 852 - protein, 38 aa, Artificial Sequence
  Description of Artificial Sequence: Synthetic polypeptide
RYSPSLKSRLTIAKDTSKYQVVLTMTNMDPVDTATYYC

SEQ ID NO: 853 - protein, 11 aa, Artificial Sequence
  Description of Artificial Sequence: Synthetic peptide
WGQGTMVTVSA

SEQ ID NO: 854 - protein, 25 aa, Artificial Sequence
  Description of Artificial Sequence: Synthetic peptide
QVQLQQSGPGLVKPSQTLSLTCAIS

SEQ ID NO: 855 - protein, 17 aa, Artificial Sequence
  Description of Artificial Sequence: Synthetic peptide
WNWIRQSPARGLEWLGR

SEQ ID NO: 856 - protein, 38 aa, Artificial Sequence
  Description of Artificial Sequence: Synthetic polypeptide
DYAISMKSRITINPDTSKNQFSLQLESVTPEDTAVYYC

SEQ ID NO: 857 - protein, 11 aa, Artificial Sequence
  Description of Artificial Sequence: Synthetic peptide
WGQGTLVTVSS

SEQ ID NO: 858 - protein, 25 aa, Artificial Sequence
  Description of Artificial Sequence: Synthetic peptide
QVQLVQSGGGLVKPGRSLRLSCTAS

SEQ ID NO: 859 - protein, 17 aa, Artificial Sequence
  Description of Artificial Sequence: Synthetic peptide
MSWFRQAPGKGLEWVGF

SEQ ID NO: 860 - protein, 38 aa, Artificial Sequence
  Description of Artificial Sequence: Synthetic polypeptide
GYAASVKGRFTISRDDSKSIAYLQMNSLKTEDTAVYYC

SEQ ID NO: 861 - protein, 11 aa, Artificial Sequence
  Description of Artificial Sequence: Synthetic peptide
WGKGTTVTVSS

SEQ ID NO: 862 - protein, 25 aa, Artificial Sequence
  Description of Artificial Sequence: Synthetic peptide
QVQLVQSGGGVVQPGRSLRLSCAAS

SEQ ID NO: 863 - protein, 17 aa, Artificial Sequence
  Description of Artificial Sequence: Synthetic peptide
MHWVRQAPGKGLEWVAL

SEQ ID NO: 864 - protein, 38 aa, Artificial Sequence
  Description of Artificial Sequence: Synthetic polypeptide
DYADSVKGRFTVSRDNSKNTLYLQMNSLRPEDTAVYFC

SEQ ID NO: 865 - protein, 11 aa, Artificial Sequence
  Description of Artificial Sequence: Synthetic peptide
WGQGTLVTVSS

SEQ ID NO: 866 - protein, 25 aa, Artificial Sequence
  Description of Artificial Sequence: Synthetic peptide
QVQLVQSGGGVVQPGRSLRLSCAAS

SEQ ID NO: 867 - protein, 17 aa, Artificial Sequence
  Description of Artificial Sequence: Synthetic peptide
MHWVRQVPGKGLEWVSG

SEQ ID NO: 868 - protein, 38 aa, Artificial Sequence
  Description of Artificial Sequence: Synthetic polypeptide
GYADSVKGRFTISRDNVKNSLYLQMNSLRTEDSALYYC

SEQ ID NO: 869 - protein, 11 aa, Artificial Sequence
  Description of Artificial Sequence: Synthetic peptide
WGQGTTVTVSS

SEQ ID NO: 870 - protein, 25 aa, Artificial Sequence
  Description of Artificial Sequence: Synthetic peptide
EVQLVQSGGGVVQPGRSLRVSCAAS

SEQ ID NO: 871 - protein, 17 aa, Artificial Sequence
  Description of Artificial Sequence: Synthetic peptide
MHWVRQAPGKGLEWVAF

SEQ ID NO: 872 - protein, 38 aa, Artificial Sequence
  Description of Artificial Sequence: Synthetic polypeptide
YYADSVEGRFTISRDNSRNTVSLEMNSLRGEDTAVYYC

SEQ ID NO: 873 - protein, 11 aa, Artificial Sequence
  Description of Artificial Sequence: Synthetic peptide
WGQGTLVTVSS

SEQ ID NO: 874 - protein, 25 aa, Artificial Sequence
  Description of Artificial Sequence: Synthetic peptide
EVQLVESGAEVKKPGESLKISCKGS

SEQ ID NO: 875 - protein, 17 aa, Artificial Sequence
  Description of Artificial Sequence: Synthetic peptide
IGWVRQMPGKGLEWMGI

SEQ ID NO: 876 - protein, 38 aa, Artificial Sequence; identical to SEQ ID NO: 420
  Description of Artificial Sequence: Synthetic polypeptide

SEQ ID NO: 877 - protein, 11 aa, Artificial Sequence
  Description of Artificial Sequence: Synthetic peptide
WGQGTMVTVSS

SEQ ID NO: 878 - protein, 25 aa, Artificial Sequence
  Description of Artificial Sequence: Synthetic peptide
QVQLVQSGGGSVKPGGSLRLSCAAS

SEQ ID NO: 879 - protein, 17 aa, Artificial Sequence
  Description of Artificial Sequence: Synthetic peptide
MHWVRQAPGKGLEWVAN

SEQ ID NO: 880 - protein, 38 aa, Artificial Sequence; identical to SEQ ID NO: 440
  Description of Artificial Sequence: Synthetic polypeptide

SEQ ID NO: 881 - protein, 11 aa, Artificial Sequence
  Description of Artificial Sequence: Synthetic peptide
WGQGTLVTVSS

SEQ ID NO: 882 - protein, 25 aa, Artificial Sequence
  Description of Artificial Sequence: Synthetic peptide
QVQLVQSGGGLVQPGGSLRLSCATS

SEQ ID NO: 883 - protein, 17 aa, Artificial Sequence
  Description of Artificial Sequence: Synthetic peptide
MHWVRQAPGKGLEWVSG

SEQ ID NO: 884 - protein, 38 aa, Artificial Sequence; identical to SEQ ID NO: 496
  Description of Artificial Sequence: Synthetic polypeptide

SEQ ID NO: 885 - protein, 11 aa, Artificial Sequence
  Description of Artificial Sequence: Synthetic peptide
WGLGTLVTVSS

SEQ ID NO: 886 - protein, 25 aa, Artificial Sequence
  Description of Artificial Sequence: Synthetic peptide
QVQLVQSGGGVVQPGRSLRLSCAAS

SEQ ID NO: 887 - protein, 17 aa, Artificial Sequence
  Description of Artificial Sequence: Synthetic peptide
MHWVRQAPGKGLEWLAV

SEQ ID NO: 888 - protein, 38 aa, Artificial Sequence; identical to SEQ ID NO: 380
  Description of Artificial Sequence: Synthetic polypeptide

SEQ ID NO: 889 - protein, 11 aa, Artificial Sequence
  Description of Artificial Sequence: Synthetic peptide
WGQGTTVTVSS

SEQ ID NO: 890 - protein, 25 aa, Artificial Sequence
  Description of Artificial Sequence: Synthetic peptide
EVQLVQSGAEVKKPGSSVKVSCRSS

SEQ ID NO: 891 - protein, 17 aa, Artificial Sequence
  Description of Artificial Sequence: Synthetic peptide
ITWVRQAPGQGLEWMGR

SEQ ID NO: 892 - protein, 38 aa, Artificial Sequence
  Description of Artificial Sequence: Synthetic polypeptide
NYAQKFQGRVTITADTSVSTAWMELSSLESDDTAIYYC

SEQ ID NO: 893 - protein, 11 aa, Artificial Sequence
  Description of Artificial Sequence: Synthetic peptide
WGQGTLVTVSS

SEQ ID NO: 894 - protein, 25 aa, Artificial Sequence
  Description of Artificial Sequence: Synthetic peptide
QVQLVQSGAEVKTPGSSVKVSCKAS

SEQ ID NO: 895 - protein, 17 aa, Artificial Sequence
  Description of Artificial Sequence: Synthetic peptide
VSWVRQAPGQGLEWMGG

SEQ ID NO: 896 - protein, 38 aa, Artificial Sequence
  Description of Artificial Sequence: Synthetic polypeptide
NYAQKFQGRITITADEATSTVYMALSSLRSEDTAMYYC

SEQ ID NO: 897 - protein, 11 aa, Artificial Sequence
  Description of Artificial Sequence: Synthetic peptide
WGQGTLVTVSS

SEQ ID NO: 898 - protein, 25 aa, Artificial Sequence
  Description of Artificial Sequence: Synthetic peptide
QVQLVQSGGGLVQPGGSLRLSCAAS

SEQ ID NO: 899 - protein, 17 aa, Artificial Sequence
  Description of Artificial Sequence: Synthetic peptide
MSWVRQAPGKGLEWVAN

SEQ ID NO: 900 - protein, 38 aa, Artificial Sequence; identical to SEQ ID NO: 440
  Description of Artificial Sequence: Synthetic polypeptide

SEQ ID NO: 901 - protein, 11 aa, Artificial Sequence
  Description of Artificial Sequence: Synthetic peptide
WGQGTTVTVSS

SEQ ID NO: 902 - protein, 25 aa, Artificial Sequence
  Description of Artificial Sequence: Synthetic peptide
QVQLVQSGGGLVQPGRSLRLSCAAS

SEQ ID NO: 903 - protein, 17 aa, Artificial Sequence
  Description of Artificial Sequence: Synthetic peptide
MHWVRQVPGKGLEWVSG

SEQ ID NO: 904 - protein, 38 aa, Artificial Sequence; identical to SEQ ID NO: 444
  Description of Artificial Sequence: Synthetic polypeptide

SEQ ID NO: 905 - protein, 11 aa, Artificial Sequence
  Description of Artificial Sequence: Synthetic peptide
WGQGTMVTVSS

SEQ ID NO: 906 - protein, 25 aa, Artificial Sequence
  Description of Artificial Sequence: Synthetic peptide
QVQLVQSGTEVKKPGASVKVSCKAS

SEQ ID NO: 907 - protein, 17 aa, Artificial Sequence
  Description of Artificial Sequence: Synthetic peptide
LHWVRQAPGQGLEWMGW

SEQ ID NO: 908 - protein, 38 aa, Artificial Sequence; identical to SEQ ID NO: 408
  Description of Artificial Sequence: Synthetic polypeptide

SEQ ID NO: 909 - protein, 11 aa, Artificial Sequence
  Description of Artificial Sequence: Synthetic peptide
WGQGTLVTVSS

SEQ ID NO: 910 - protein, 25 aa, Artificial Sequence
  Description of Artificial Sequence: Synthetic peptide
QVTLKESGPGLVNPSETLSLTCTVS

SEQ ID NO: 911 - protein, 17 aa, Artificial Sequence
  Description of Artificial Sequence: Synthetic peptide
WSWIRQSPGKGLEWIGY

SEQ ID NO: 912 - protein, 38 aa, Artificial Sequence; identical to SEQ ID NO: 504
  Description of Artificial Sequence: Synthetic polypeptide

SEQ ID NO: 913 - protein, 11 aa, Artificial Sequence
  Description of Artificial Sequence: Synthetic peptide
WGQGTLVTVSS

SEQ ID NO: 914 - protein, 25 aa, Artificial Sequence
  Description of Artificial Sequence: Synthetic peptide
NFMLTQPHSVSESPGKTVTISCTRS

SEQ ID NO: 915 - protein, 17 aa, Artificial Sequence
  Description of Artificial Sequence: Synthetic peptide
VQWYQQRPGSAPTTVIY

SEQ ID NO: 916 - protein, 38 aa, Artificial Sequence; identical to SEQ ID NO: 616
  Description of Artificial Sequence: Synthetic polypeptide

SEQ ID NO: 917 - protein, 10 aa, Artificial Sequence
  Description of Artificial Sequence: Synthetic peptide
FGGGTKLTVL

SEQ ID NO: 918 - protein, 25 aa, Artificial Sequence
  Description of Artificial Sequence: Synthetic peptide
QSVLTQPPSASGSPGQSVTISCTGT

SEQ ID NO: 919 - protein, 17 aa, Artificial Sequence
  Description of Artificial Sequence: Synthetic peptide
VSWYQHHPGKAPKLIIY

SEQ ID NO: 920 - protein, 36 aa, Artificial Sequence
  Description of Artificial Sequence: Synthetic polypeptide
KRPSGVPDRFSGSKSGNTASLTVSGLQADDEADYYC

SEQ ID NO: 921 - protein, 10 aa, Artificial Sequence
  Description of Artificial Sequence: Synthetic peptide
FGGGTKLTVL

SEQ ID NO: 922 - protein, 25 aa, Artificial Sequence
  Description of Artificial Sequence: Synthetic peptide
NFMLTQPHSVSESPGKTVTISCTRS

SEQ ID NO: 923 - protein, 17 aa, Artificial Sequence
  Description of Artificial Sequence: Synthetic peptide
VQWYQQRPGSAPTTVIY

SEQ ID NO: 924 - protein, 38 aa, Artificial Sequence
  Description of Artificial Sequence: Synthetic polypeptide
QRPSGVPDRFSGSIDRSSNSASLTISGLTPDDEADYYC

SEQ ID NO: 925 - protein, 10 aa, Artificial Sequence
  Description of Artificial Sequence: Synthetic peptide
FGTGTKVTVL

SEQ ID NO: 926 - protein, 25 aa, Artificial Sequence
  Description of Artificial Sequence: Synthetic peptide
QSVLTQPPSVSGSPGQRVTMSCTGS

SEQ ID NO: 927 - protein, 17 aa, Artificial Sequence
  Description of Artificial Sequence: Synthetic peptide
VHWYQQVPGAAPRLLIY

SEQ ID NO: 928 - protein, 36 aa, Artificial Sequence
  Description of Artificial Sequence: Synthetic polypeptide
NRPSGVPDRFSGSKSGTSASLTITGLQAEDEADYYC

SEQ ID NO: 929 - protein, 10 aa, Artificial Sequence
  Description of Artificial Sequence: Synthetic peptide
FGTGTKVTVL

SEQ ID NO: 930 - protein, 25 aa, Artificial Sequence
  Description of Artificial Sequence: Synthetic peptide
QSALTQPASVSGSPGQSITISCTGT

SEQ ID NO: 931 - protein, 17 aa, Artificial Sequence
  Description of Artificial Sequence: Synthetic peptide
VSWYQQHPGKAPKVMIY

SEQ ID NO: 932 - protein, 36 aa, Artificial Sequence; identical to SEQ ID NO: 656
  Description of Artificial Sequence: Synthetic polypeptide

SEQ ID NO: 933 - protein, 10 aa, Artificial Sequence
  Description of Artificial Sequence: Synthetic peptide
FGGGTKLTVL

SEQ ID NO: 934 - protein, 25 aa, Artificial Sequence
  Description of Artificial Sequence: Synthetic peptide
NFMLTQPHSMSGSAGKTVTVSCIRS

SEQ ID NO: 935 - protein, 17 aa, Artificial Sequence
  Description of Artificial Sequence: Synthetic peptide
VQWYQQRPGSAPTTVIY

SEQ ID NO: 936 - protein, 38 aa, Artificial Sequence; identical to SEQ ID NO: 616
  Description of Artificial Sequence: Synthetic polypeptide

SEQ ID NO: 937 - protein, 10 aa, Artificial Sequence
  Description of Artificial Sequence: Synthetic peptide
FGGGTRLTVL

SEQ ID NO: 938 - protein, 25 aa, Artificial Sequence
  Description of Artificial Sequence: Synthetic peptide
QPGLTQPPAASGTPGQRVTVSCSGA

SEQ ID NO: 939 - protein, 17 aa, Artificial Sequence
  Description of Artificial Sequence: Synthetic peptide
VSWFKQFPETAPRLLIS

SEQ ID NO: 940 - protein, 36 aa, Artificial Sequence
  Description of Artificial Sequence: Synthetic polypeptide
HRPSGVPDRVSGSKSGTSASLTISGLQSDDEADYYC

SEQ ID NO: 941 - protein, 10 aa, Artificial Sequence
  Description of Artificial Sequence: Synthetic peptide
FGSGTKVTVL

SEQ ID NO: 942 - protein, 25 aa, Artificial Sequence
  Description of Artificial Sequence: Synthetic peptide
NFMLTQPHSVSESPGKTVTISCTGS

SEQ ID NO: 943 - protein, 17 aa, Artificial Sequence
  Description of Artificial Sequence: Synthetic peptide
VQWYQQRPGSAPTTVIY

SEQ ID NO: 944 - protein, 38 aa, Artificial Sequence
  Description of Artificial Sequence: Synthetic polypeptide
QRPSGVPDRFSGSIDSSSNSASLLISGLKTEDEADYYC

SEQ ID NO: 945 - protein, 10 aa, Artificial Sequence
  Description of Artificial Sequence: Synthetic peptide
FGGGTKLTVL

SEQ ID NO: 946 - protein, 25 aa, Artificial Sequence
  Description of Artificial Sequence: Synthetic peptide
QSALTQPRSVSGSPGQSVTISCTGT

SEQ ID NO: 947 - protein, 17 aa, Artificial Sequence
  Description of Artificial Sequence: Synthetic peptide
VSWYQQHPGKAPKLIIY

SEQ ID NO: 948 - protein, 36 aa, Artificial Sequence; identical to SEQ ID NO: 676
  Description of Artificial Sequence: Synthetic polypeptide

SEQ ID NO: 949 - protein, 10 aa, Artificial Sequence
  Description of Artificial Sequence: Synthetic peptide
FGGGTKLTVL

SEQ ID NO: 950 - protein, 25 aa, Artificial Sequence
  Description of Artificial Sequence: Synthetic peptide
NFMLTQPHSVSESPGKTVIISCTRT

SEQ ID NO: 951 - protein, 17 aa, Artificial Sequence
  Description of Artificial Sequence: Synthetic peptide
VQWYRQRPGSAPTTVIY

SEQ ID NO: 952 - protein, 38 aa, Artificial Sequence; identical to SEQ ID NO: 560
  Description of Artificial Sequence: Synthetic polypeptide

SEQ ID NO: 953 - protein, 10 aa, Artificial Sequence
  Description of Artificial Sequence: Synthetic peptide
FGTGTKLTVL

SEQ ID NO: 954 - protein, 25 aa, Artificial Sequence
  Description of Artificial Sequence: Synthetic peptide
QSALTQPPSASGSPGQSVTISCTGT

SEQ ID NO: 955 - protein, 17 aa, Artificial Sequence
  Description of Artificial Sequence: Synthetic peptide
VSWYQQVPGKAPKLIIY

SEQ ID NO: 956 - protein, 36 aa, Artificial Sequence; identical to SEQ ID NO: 668
  Description of Artificial Sequence: Synthetic polypeptide

SEQ ID NO: 957 - protein, 10 aa, Artificial Sequence
  Description of Artificial Sequence: Synthetic peptide
FGGGTKLTVL

SEQ ID NO: 958 - protein, 25 aa, Artificial Sequence
  Description of Artificial Sequence: Synthetic peptide
QPVLTQPPSASGTPGQRVSISCSGS

SEQ ID NO: 959 - protein, 17 aa, Artificial Sequence
  Description of Artificial Sequence: Synthetic peptide
VDWYHQVPGTAPQLLIY

SEQ ID NO: 960 - protein, 36 aa, Artificial Sequence
  Description of Artificial Sequence: Synthetic polypeptide
ERSSGVPDRFSASRSGNTASLTIIGLQPEDEADYYC

SEQ ID NO: 961 - protein, 10 aa, Artificial Sequence
  Description of Artificial Sequence: Synthetic peptide
FGGGTKLTVL

SEQ ID NO: 962 - protein, 25 aa, Artificial Sequence
  Description of Artificial Sequence: Synthetic peptide
NFMLTQPHSVSESPGKTVTISCTGS

SEQ ID NO: 963 - protein, 17 aa, Artificial Sequence
  Description of Artificial Sequence: Synthetic peptide
VQWYQQRPGSAPTTVIY

SEQ ID NO: 964 - protein, 38 aa, Artificial Sequence; identical to SEQ ID NO: 620
  Description of Artificial Sequence: Synthetic polypeptide

SEQ ID NO: 965 - protein, 10 aa, Artificial Sequence
  Description of Artificial Sequence: Synthetic peptide
FGGGTKLTVL

SEQ ID NO: 966 - protein, 25 aa, Artificial Sequence
  Description of Artificial Sequence: Synthetic peptide
LPVLTQPPSVSVAPGQTASITCGGD

SEQ ID NO: 967 - protein, 17 aa, Artificial Sequence
  Description of Artificial Sequence: Synthetic peptide
VHWYQQKPGQAPLLVIY

SEQ ID NO: 968 - protein, 36 aa, Artificial Sequence; identical to SEQ ID NO: 672
  Description of Artificial Sequence: Synthetic polypeptide

SEQ ID NO: 969 - protein, 10 aa, Artificial Sequence
  Description of Artificial Sequence: Synthetic peptide
FGGGTTLTVL

SEQ ID NO: 970 - protein, 25 aa, Artificial Sequence
  Description of Artificial Sequence: Synthetic peptide
QSALTQPPSVSGSPGQSVTISCTGT

SEQ ID NO: 971 - protein, 17 aa, Artificial Sequence
  Description of Artificial Sequence: Synthetic peptide
VSWYQQPPGKAPKLMIY

SEQ ID NO: 972 - protein, 36 aa, Artificial Sequence; identical to SEQ ID NO: 588
  Description of Artificial Sequence: Synthetic polypeptide

SEQ ID NO: 973 - protein, 10 aa, Artificial Sequence
  Description of Artificial Sequence: Synthetic peptide
FGTGTKVTVL

SEQ ID NO: 974 - protein, 25 aa, Artificial Sequence
  Description of Artificial Sequence: Synthetic peptide
NFMLTQPHSVSESPGKTVTISCTGS

SEQ ID NO: 975 - protein, 17 aa, Artificial Sequence
  Description of Artificial Sequence: Synthetic peptide
VQWYQQRPGSAPTTVIY

SEQ ID NO: 976 - protein, 38 aa, Artificial Sequence; identical to SEQ ID NO: 616
  Description of Artificial Sequence: Synthetic polypeptide

SEQ ID NO: 977 - protein, 10 aa, Artificial Sequence
  Description of Artificial Sequence: Synthetic peptide
FGGGTKLTVL

SEQ ID NO: 978 - protein, 15 aa, Artificial Sequence
  Description of Artificial Sequence: Synthetic peptide
ARDRGRGGQAGAFDY

SEQ ID NO: 979 - protein, 7096 aa, Severe acute respiratory syndrome coronavirus 2 [sequence omitted]

SEQ ID NO: 980 - protein, 1273 aa, Severe acute respiratory syndrome coronavirus 2
MFVFLVLLPLVSSQCVNLTTRTQLPPAYTNSFTRGVYYPDKVFRSSVLHSTQDLFLPFFSNVTWFHAIHVSGTNGTKRFDNPVLPFNDGVYFASTEKSNIIRGWIFGTTLDSKTQSLLIVNNATNVVIKVCEFQFCNDPFLGVYYHKNNKSWMESEFRVYSSANNCTFEYVSQPFLMDLEGKQGNFKNLREFVFKNIDGYFKIYSKHTPINLVRDLPQGFSALEPLVDLPIGINITRFQTLLALHRSYLTPGDSSSGWTAGAAAYYVGYLQPRTFLLKYNENGTITDAVDCALDPLSETKCTLKSFTVEKGIYQTSNFRVQPTESIVRFPNITNLCPFGEVFNATRFASVYAWNRKRISNCVADYSVLYNSASFSTFKCYGVSPTKLNDLCFTNVYADSFVIRGDEVRQIAPGQTGKIADYNYKLPDDFTGCVIAWNSNNLDSKVGGNYNYLYRLFRKSNLKPFERDISTEIYQAGSTPCNGVEGFNCYFPLQSYGFQPTNGVGYQPYRVVVLSFELLHAPATVCGPKKSTNLVKNKCVNFNFNGLTGTGVLTESNKKFLPFQQFGRDIADTTDAVRDPQTLEILDITPCSFGGVSVITPGTNTSNQVAVLYQDVNCTEVPVAIHADQLTPTWRVYSTGSNVFQTRAGCLIGAEHVNNSYECDIPIGAGICASYQTQTNSPRRARSVASQSIIAYTMSLGAENSVAYSNNSIAIPTNFTISVTTEILPVSMTKTSVDCTMYICGDSTECSNLLLQYGSFCTQLNRALTGIAVEQDKNTQEVFAQVKQIYKTPPIKDFGGFNFSQILPDPSKPSKRSFIEDLLFNKVTLADAGFIKQYGDCLGDIAARDLICAQKFNGLTVLPPLLTDEMIAQYTSALLAGTITSGWTFGAGAALQIPFAMQMAYRFNGIGVTQNVLYENQKLIANQFNSAIGKIQDSLSSTASALGKLQDVVNQNAQALNTLVKQLSSNFGAISSVLNDILSRLDKVEAEVQIDRLITGRLQSLQTYVTQQLIRAAEIRASANLAATKMSECVLGQSKRVDFCGKGYHLMSFPQSAPHGVVFLHVTYVPAQEKNFTTAPAICHDGKAHFPREGVFVSNGTHWFVTQRNFYEPQIITTDNTFVSGNCDVVIGIVNNTVYDPLQPELDSFKEELDKYFKNHTSPDVDLGDISGINASVVNIQKEIDRLNEVAKNLNESLIDLQELGKYEQYIKWPWYIWLGFIAGLIAIVMVTIMLCCMTSCCSCLKGCCSCGSCCKFDEDDSEPVLKGVKLHYT

SEQ ID NO: 981 - protein, 122 aa, Artificial Sequence
  Description of Artificial Sequence: Synthetic polypeptide
QVTLKESGPTLVKPTQTLTLTCTFSGFSLTTSGVSVGWIRQPPGKALEWLALIHWDDDKRYSPSLRSRLTITRDTSKNQVVLTVTDMDPADTGTYYCASFIMTVYAEYFEDWGQGTLVTVSS

SEQ ID NO: 982 - protein, 107 aa, Artificial Sequence
  Description of Artificial Sequence: Synthetic polypeptide
EIVLTQSPATLSVSPGERATLSCRASQSVSSNLAWYQQKPGQAPRLLMYDVSTRATGIPARFSGSGSGTEFSLTISSLQSEDFAVYYCQQRGAWPLTFGGGTKVEIK

SEQ ID NO: 983 - protein, 10 aa, Artificial Sequence
  Description of Artificial Sequence: Synthetic peptide
GFSLTTSGVS

SEQ ID NO: 984 - protein, 7 aa, Artificial Sequence
  Description of Artificial Sequence: Synthetic peptide
IHWDDDK

SEQ ID NO: 985 - protein, 14 aa, Artificial Sequence
  Description of Artificial Sequence: Synthetic peptide
ASFIMTVYAEYFED

SEQ ID NO: 986 - protein, 6 aa, Artificial Sequence
  Description of Artificial Sequence: Synthetic peptide
QSVSSN

SEQ ID NO: 987 - protein, 3 aa, Artificial Sequence
  Description of Artificial Sequence: Synthetic peptide
DVS

SEQ ID NO: 988 - protein, 9 aa, Artificial Sequence
  Description of Artificial Sequence: Synthetic peptide
QQRGAWPLT

SEQ ID NO: 989 - protein, 25 aa, Artificial Sequence
  Description of Artificial Sequence: Synthetic peptide
QVTLKESGPTLVKPTQTLTLTCTFS

SEQ ID NO: 990 - protein, 17 aa, Artificial Sequence
  Description of Artificial Sequence: Synthetic peptide
VGWIRQPPGKALEWLAL

SEQ ID NO: 991 - protein, 38 aa, Artificial Sequence; identical to SEQ ID NO: 468
  Description of Artificial Sequence: Synthetic polypeptide

SEQ ID NO: 992 - protein, 11 aa, Artificial Sequence
  Description of Artificial Sequence: Synthetic peptide
WGQGTLVTVSS

SEQ ID NO: 993 - protein, 26 aa, Artificial Sequence
  Description of Artificial Sequence: Synthetic peptide
EIVLTQSPATLSVSPGERATLSCRAS

SEQ ID NO: 994 - protein, 17 aa, Artificial Sequence
  Description of Artificial Sequence: Synthetic peptide
LAWYQQKPGQAPRLLMY

SEQ ID NO: 995 - protein, 36 aa, Artificial Sequence
  Description of Artificial Sequence: Synthetic polypeptide
TRATGIPARFSGSGSGTEFSLTISSLQSEDFAVYYC

SEQ ID NO: 996 - protein, 10 aa, Artificial Sequence
  Description of Artificial Sequence: Synthetic peptide
FGGGTKVEIK

SEQ ID NO: 997 - protein, 121 aa, Artificial Sequence
  Description of Artificial Sequence: Synthetic polypeptide
EVQLVQSGGGVVQPGRSLRLSCAASGFTFSSYAMHWVRQAPGKGLEWVAVISYDGSNKYYADSVKGRFTISRDNSKNTLYLQMNSLRAEDTAVYYCARVNSGSYYGAFDIWGQGTTVTVSS

SEQ ID NO: 998 - protein, 111 aa, Artificial Sequence
  Description of Artificial Sequence: Synthetic polypeptide
NFMLTQPHSVSESPGKTVTMSCTRSSGDIATRHVQWYQQRPGSAPTTVIYESNQRPSGVSGRFSGSIDSSSNSASLTISGLQPEDEADYYCQSYDSTNPWVFGGGTKLTVL

SEQ ID NO: 999 - protein, 120 aa, Artificial Sequence
  Description of Artificial Sequence: Synthetic polypeptide
QVQLVQSGGGLVQPGRSLRLSCAASGFTFDDYAMHWVRQAPGKGLEWVSGISWNSGSIGYADSVKGRFTISRDNAKNSLYLQMDSLRAEDTAVYYCARDGGIQLSSFEYWGQGTLVTVSS

SEQ ID NO: 1000 - protein, 111 aa, Artificial Sequence
  Description of Artificial Sequence: Synthetic polypeptide
QPVLTQPPSASGSPGQSVTISCTGTSSDVGAYNYVSWYQQHPDKAPKLLIYEVSKRPSGVPDRFSGSKSGNTASLTVSGLQADDEADYYCSSYAGTRKYYVFGGGTKVTVL

SEQ ID NO: 1001 - protein, 120 aa, Artificial Sequence
  Description of Artificial Sequence: Synthetic polypeptide
QVQLVQSGGGVVQPGRSLRLSCAASGFTFSSYGMHWVRQAPGKGLEWVAVISYDGSNKYYADSVKGRFTISRDNSKNTLYLQMNSLRAEDTAVYYCARGSGSYLTDFDYWGQGTLVTVSS

SEQ ID NO: 1002 - protein, 108 aa, Artificial Sequence
  Description of Artificial Sequence: Synthetic polypeptide
ETTLTQSPATLSLSPGERATLSCRASQIVTNNNLAWYQQKPGQAPRLLIYGASSRATGIPDRFSGSGSGTDFTLTISRLEPEDFAVYYCQQYYYWPLSFGGGTKVEIK

SEQ ID NO: 1003 - protein, 119 aa, Artificial Sequence
  Description of Artificial Sequence: Synthetic polypeptide
QVQLVQSGGGVVQPGRSLRLSCAASGFTFSSYAMHWVRQAPGKGLEWVAVMSYDGSNKYYADSVKGRFTISRDNAKNSLYLQMNSLRDEDTAVYYCARTGGYLRPIDYWGQGTLVTVSS

SEQ ID NO: 1004 - protein, 110 aa, Artificial Sequence
  Description of Artificial Sequence: Synthetic polypeptide
QPVLTQPRSVSGSPGQSVTISCTGTSSDVGGYKYVSWYQHHPGKAPKLMIYDVSERPSGVSSRFSGSKSGNTASLTISGLQGEDEADYFCSSFSQTNSYVFGTGTRVAVL

SEQ ID NO: 1005 - protein, 121 aa, Artificial Sequence
  Description of Artificial Sequence: Synthetic polypeptide
EVQLVQSGGGVVQPGRSLRLSCAASGFTFSSYAMHWVRQAPGKGLEWVAVISYDGSNKYYADSVKGRFTISRDNSKNTLYLQMNSLRAEDTAVYYCARDRSGSYWGAFDIWGQGTLVTVSS

SEQ ID NO: 1006 - protein, 111 aa, Artificial Sequence
  Description of Artificial Sequence: Synthetic polypeptide
QSVLTQPPSASGSPGQSVTISCTGTSSDVGRYKYVSWYQQHPGKAPKPMIYEVNKRPSGVPDRFSGSKSGNTASLTVSGLQAEDEADYYCSSYAGSNNPYVFGTGTKVTVL

SEQ ID NO: 1007 - protein, 120 aa, Artificial Sequence
  Description of Artificial Sequence: Synthetic polypeptide
QVQLVQSGGGVVQPGRSLRLSCAASGFTFSSYGMHWVRQAPGKGLEWVAVISYDGSNKYYADSVKGRFTISRDNSKNTLYLQMNSLRAEDTAVYYCAKGRGSYSTYFDYWGQGTLVTVSS

SEQ ID NO: 1008 - protein, 109 aa, Artificial Sequence
  Description of Artificial Sequence: Synthetic polypeptide
EIVLTQSPATLSLSPGERATLSCRASQNVPSNSLAWYQQKPGQAPRLLINGASSRANGIPDRFSGSGSGTDFTLTITRLEPEDFAVYFCQLYDRSSQLAFGGGTKLEIK

SEQ ID NO: 1009 - protein, 121 aa, Artificial Sequence
  Description of Artificial Sequence: Synthetic polypeptide
QVQLVQSGGGVVQPGRSLRLSCAASGFTFSGYAMHWVRQAPGKGLEWVAVVSYDGSNKYYADSVKGRFTISRDNSKNTLYLQMNSLRAEDTAVYYCARSEGYSSGWPLDYWGQGTLVTVSS

SEQ ID NO: 1010 - protein, 107 aa, Artificial Sequence
  Description of Artificial Sequence: Synthetic polypeptide
SSELTQDPAVSVALGQTVRITCQGDSLGTYYASWYQQKPGQAPLLVIYGKNNRPSGIPDRFSGSSSGNTASLTITGAQAEDEADYYCNSRNNSGYHEFGGGTKLTVL

SEQ ID NO: 1011 - protein, 115 aa, Artificial Sequence
  Description of Artificial Sequence: Synthetic polypeptide
QVQLVQSGAEVKKPGESLKISCKGSGYNFIDYWIAWVRQLPGQGLEWMGIIYPGDSDARYSPSFQGQVTISADKSINTAYLQWSRLKASDTAKYYCARGYAMDVWGQGTTVTVSS

SEQ ID NO: 1012 - protein, 109 aa, Artificial Sequence
  Description of Artificial Sequence: Synthetic polypeptide
QSVLTQPLSASGTPGHRVTISCSGSQSNIGSNTVNWYQQVPGTAPKLLIYVNNRRPSGVPDRFSGSKSGTSAALAISGLQSEDEADYYCSSYAGSNDYVFGTGTKVTVL

SEQ ID NO: 1013 - protein, 119 aa, Artificial Sequence
  Description of Artificial Sequence: Synthetic polypeptide
QVELVQSGAEVKEPGASVKVSCKDSGHTFLGHYMHWVRQAPGQGLEWMGWINPNSGVTKYAEKFQGWVTMTRDTSISTAYMELSRLKSDDTALYYCARERTTGGAFDIWGQGTMVTVSS

SEQ ID NO: 1014 - protein, 111 aa, Artificial Sequence
  Description of Artificial Sequence: Synthetic polypeptide
NFMLTQPHSVSESPGKTVTISCTRSSGSIASNYVQWYQQRPGSAPTAVIFGDNQRPSGVPDRFSGSIDSSSNSASLTISGLRTEDEADYYCQSFDGSYHWVFGGGTKLTVL

SEQ ID NO: 1015 - protein, 121 aa, Artificial Sequence; identical to SEQ ID NO: 1005
  Description of Artificial Sequence: Synthetic polypeptide

SEQ ID NO: 1016 - protein, 110 aa, Artificial Sequence
  Description of Artificial Sequence: Synthetic polypeptide
LPVLTQPPSASGTPGQRVTISCSGSSSNIGSNTVNWYQQLPGTAPKLLIYSNNQRPSGVPDRFSGSKSGTSASLAISGLRSEDEADYYCATWDDGLSGRVFGGGTNLAVL

SEQ ID NO: 1017 - protein, 118 aa, Artificial Sequence
  Description of Artificial Sequence: Synthetic polypeptide
QVQLVQSGGGVVQPGRSLRLSCAASGFTFSSYAMHWVRQAPGKGLEWVAVISYDGSNKYYADSVKGRFTISRDNSKNTLYLQMNSLRAEDTAVYYCARGDYYYYMDVWGKGTLVTVSS

SEQ ID NO: 1018 - protein, 109 aa, Artificial Sequence
  Description of Artificial Sequence: Synthetic polypeptide
SSELTQDPAVSVALGQTVRITCQGDSLRSYYASWYQQKPGQAPVLVIYGKNNRPSGIPDRFSGSSSGNTASLTITGAQAEDEADYYCNSRDSSGNHLRVFGTGTKVTVL

SEQ ID NO: 1019 - protein, 121 aa, Artificial Sequence
  Description of Artificial Sequence: Synthetic polypeptide
QVQLQESGGGVVQPGRSLRLSCAASGFTFSSYAMHWVRQAPGKGLEWVAVISYDGSNKYYADSVKGRFTISRDNSKNTLYLQMNSLRAEDTAVYYCARGLGGGYYYGMDVWGQGTLVTVSS

SEQ ID NO: 1020 - protein, 110 aa, Artificial Sequence
  Description of Artificial Sequence: Synthetic polypeptide
SYELTQPPSVSQGLRQTATLTCTGNSNNVGNQGAAWLQQHQGHPPKLLSYRNNIRPSGISERLSASTSGNTASLTITGLQPEDEADYYCSAWDNSLGAWVFGEGTKLTVL

SEQ ID NO: 1021 - protein, 115 aa, Artificial Sequence
  Description of Artificial Sequence: Synthetic polypeptide
QVQLVQSGAEVKKPGESLKISCKGSGYNFIDYWIAWVRQLPGQGLEWMGIIYPGDSDARYSPSFQGQVTISADKSINTAYLQWSRLKASDTAKYYCARGQAMDVWGQGTTVTVSS

SEQ ID NO: 1022 - protein, 109 aa, Artificial Sequence; identical to SEQ ID NO: 1012
  Description of Artificial Sequence: Synthetic polypeptide

SEQ ID NO: 1023 - protein, 121 aa, Artificial Sequence
  Description of Artificial Sequence: Synthetic polypeptide
EVQLVQSGGGVVQPGRSLRLSCAASGFTFSSYAMHWVRQAPGKGLEWVAVISYDGSNKYYADSVKGRFTISRDNSKNTLYLQMNSLRAEDTAVYYCARGNRGSYYGAFDSWGQGTTATASS

SEQ ID NO: 1024 - protein, 111 aa, Artificial Sequence
  Description of Artificial Sequence: Synthetic polypeptide
NFMLTHPHSVSQSPGKTATMSCTRSSGDIATRHVQWYQKRPGSAPTTVIYESNQRPAGVSGRFSGSIDSSSNSASLTISAVHPEDEADYYCLTYDITNPWVFGGGTNLTVL

SEQ ID NO: 1025 - protein, 121 aa, Artificial Sequence
  Description of Artificial Sequence: Synthetic polypeptide
EVQLVQSGGGVVQPGRSLRLSCAASGFTFSSYAMHWVRQAPGKGLEWVAVISYDGSNKYYADSVKGRFTISRDNSKNTLYLQMNSLRAEDTAVYYCARDNSGSYYGAFDIWGQGTLVTVSS

SEQ ID NO: 1026 - protein, 111 aa, Artificial Sequence
  Description of Artificial Sequence: Synthetic polypeptide
HFVLTQPPSASESPGKTVTMSCTGTSGDIATKHDDCCHQRPPGAPPTAMNDNDHKPSAGSADLFAAFDSASTSALIAFSVLHADDDDDYCCSYDDSTNPCVFGAGTKVTVL

SEQ ID NO: 1027 - protein, 120 aa, Artificial Sequence; identical to SEQ ID NO: 1007
  Description of Artificial Sequence: Synthetic polypeptide

SEQ ID NO: 1028 - protein, 108 aa, Artificial Sequence
  Description of Artificial Sequence: Synthetic polypeptide
ETTLTQSPGTLSLSPGERATLSCRASQSISSSYLAWYQQKPGQAPRLLIYDASNRAPGIPARFSGSGSGTDFTLTISSLEPEDFAVYYCQQRGNWPLTFGPGTKVHIK

SEQ ID NO: 1029 - protein, 120 aa, Artificial Sequence
  Description of Artificial Sequence: Synthetic polypeptide
QVQLVQSGGGVVQPGRSLRLSCAASGFTFSIYGMHWVRQAPGKGLEWVAGISYDGSNKYYADSVKGRFTISRDNSKNTLYLQMNSLRAEDTAVYYCAKGRGSYSTYFDYWGQGTLVTVSS

SEQ ID NO: 1030 - protein, 109 aa, Artificial Sequence
  Description of Artificial Sequence: Synthetic polypeptide
EIVLTQSPATLALSPGERATLSCRDSQNVPSNSLAWYQQRPGQAPRLLINGASSRANGIPYRFSGSGSGTDFTLTITRLEPEDFAVYFCQLYDRSSQLASAERTKMEIK

SEQ ID NO: 1031 - protein, 120 aa, Artificial Sequence
  Description of Artificial Sequence: Synthetic polypeptide
QVTLKESGPTLVKPTQTLTLTCTFSGFSLSTSGVGVGWIRQPPGKALEWLALIYWDDDKRYSPSLKSRLTISKDTSRNQVVLTMTNMDPADTGTYYCAHRRPDWDAFDVWGQGTMVTVSS

SEQ ID NO: 1032 - protein, 108 aa, Artificial Sequence
  Description of Artificial Sequence: Synthetic polypeptide
SSELTQDPAVSVALGQTVRITCQGDSLTIFFANWYQQKPGQAPILVMSKDTERPSGIPERFSGSSSGTRVTLTISGVQAEDEADYYCQSADTSGTLKVFGGGTKLTVL

SEQ ID NO: 1033 - protein, 120 aa, Artificial Sequence
  Description of Artificial Sequence: Synthetic polypeptide
QVQLVQSGGGLVKPGGSLRLSCSASGFTFSSYAMHWVRQAPGKGLEWVAVISYDGSNKYYADSVQGRITISRDNSKNTLYLQMNSLRAEDTAVYFCARSDGYPYEPFDYWGQGTLVTVSS

SEQ ID NO: 1034 - protein, 110 aa, Artificial Sequence
  Description of Artificial Sequence: Synthetic polypeptide
QSALTQPASVSGSPGQSITISCTGTSSDLGGHNFVSWYQQHPGKAPKLMIYGVNKRPSGVPDRFSGSKSGNTASLTVSGLQAEDEADYYCSSYEATHIYVFGTGTKVAVL

SEQ ID NO: 1035 - protein, 119 aa, Artificial Sequence
  Description of Artificial Sequence: Synthetic polypeptide
QVQLVQSGGGVVQPGRSLRLSCAASGFTFSSYGMHWVRQAPGKGLEWVAVISYDGSNKYYADSVKGRFTISRDNSKNTLYLQMNSLRAEDTAVYYCARGSGITGAFRDWGQGTLVTVSS

SEQ ID NO: 1036 - protein, 111 aa, Artificial Sequence
  Description of Artificial Sequence: Synthetic polypeptide
QSALTQPASVSGSPGQSITISCTGTSSDVGSYNLVSWYQQHPGKAPKLMISEVSNRPSGVSNRFSGSKSGNTASLTISGLQAEDEADYYCSSFSSGSIPYVFGAGTKVTVL

SEQ ID NO: 1037 - protein, 121 aa, Artificial Sequence
  Description of Artificial Sequence: Synthetic polypeptide
QVQLVQSGGGVVQPGRSLRLSCAASGFTFSSYGMHWVRQAPGKGLEWVAVISYDGSNKYYADSVKGRFTISRDNSKNTLYLQMNSLRTEDTAVYYCARPQGGAYNGYFDSWGQGTLVTVSS

SEQ ID NO: 1038 - protein, 107 aa, Artificial Sequence
  Description of Artificial Sequence: Synthetic polypeptide
EIVLTQSPATLSVSPGERATLSCRASQSVSTNLAWYQQKPGQAPRLLIYGASTRATGIPARFSGSGSGTEFTLTVSRLEPEDFAVYYCQHYANWPRTFGQGTRVEIR

SEQ ID NO: 1039 - protein, 121 aa, Artificial Sequence
  Description of Artificial Sequence: Synthetic polypeptide
QVQLVQSGGGVVQPGRSLRLSCAASGFTFSSYAMHWVRQAPGKGLEWVAVISYDGSNKYYADSVKGRFTISRDNSKNTLYLQMNSLRAEDTAVYYCARSDSGNYYGAFDIWGQGTTVTVSS

SEQ ID NO: 1040 - protein, 110 aa, Artificial Sequence
  Description of Artificial Sequence: Synthetic polypeptide
QSVLTQPPSASGTPGQRVTISCSGSSSNIGSNTVNWYQQLPGTAPKLLIYSNNQRPSGVPDRFSGSKSGTSVSLAISGLQSEDEADYYCATWDDSLNGPVFGGGTNLAVL

SEQ ID NO: 1041 - protein, 121 aa, Artificial Sequence
  Description of Artificial Sequence: Synthetic polypeptide
QVQLQESGGGVVQPGRALRLSCRASGFNFGTFGMHWVRQAPGKGLEWVAVISYDGSNKYYADSVKGRFTISRDNSKNTLYLQMNSLRAEDTAVYYCARVRGSGYPHAFDIWGQGTMVTVSS

SEQ ID NO: 1042 - protein, 109 aa, Artificial Sequence
  Description of Artificial Sequence: Synthetic polypeptide
SYELTQPPSVSVAPGKTANMTCGGNNIGSKSVHWYQQKPGQAPVLVVYDDTDRPPGIPERFSGSNSGNTATLTISRVEVGDEADYYCQVWDTSSDHPYVFGTGTKVTVL

SEQ ID NO: 1043 - protein, 122 aa, Artificial Sequence
  Description of Artificial Sequence: Synthetic polypeptide
QVQLVQSGAEVKKPGSSVKVSCKASGGTFSSYAISWVRQAPGQGLEWMGGIIPIFGTANYAQKFQGRVTITADKSTSTAYMELSSLRSEDTAVYYCARYKWEPNVGGAFDIWGQGTMVTVSS

SEQ ID NO: 1044 - protein, 107 aa, Artificial Sequence
  Description of Artificial Sequence: Synthetic polypeptide
SSELTQDPAVSVALGQTVRITCQGDSLRSYYASWYQQKPGQAPVLVIYGGNNRPSGIPDRISGSSSGNTASLTITGAQAEDEADYYCSSRATSAFYVFGTGTKVTVL

SEQ ID NO: 1045 - protein, 120 aa, Artificial Sequence
  Description of Artificial Sequence: Synthetic polypeptide
EVQLVQSGAEVKKPGASVKVSCKASGYTFTSYGISWVRQAPGQGLEWMGWISAYNGNTNYAQKLQGRVTMTTNTSTNTAYMELRSLRSDDTAGYYWAKGGSYGRYGMDVWGQGTTVTVSS

SEQ ID NO: 1046 - protein, 111 aa, Artificial Sequence
  Description of Artificial Sequence: Synthetic polypeptide
QSGLTQPPSVSGAPGQRVTISCTGSSSNIGAGYDVHWYQQLPGTAPKLIIYGNSNRPSGVPDRFSGSKSGTSASLAITGLQAEDEADYYCQSYDSSLSGWVFGGGTKLTVL

SEQ ID NO: 1047 - protein, 119 aa, Artificial Sequence
  Description of Artificial Sequence: Synthetic polypeptide
QVTLKESGPTLVKPTQTLTLTCTFSGFSLSTSGVGVGWIRQPPGKALEWLALIYWDDDKRYSPSLKSRLTITKDTSKNQVVLTMTNMDPVDTATYYCAKMGNAWTFEHWGQGTLVTVSS

SEQ ID NO: 1048 - protein, 107 aa, Artificial Sequence
  Description of Artificial Sequence: Synthetic polypeptide
SYELTQPPSVSVSPGQTARITCSGDALPNRYAYWYQQRPGQAPVLVIYKDSERPSGIPERFSGSSSGTTVTLTISGVQAEDEADYYCQSVNTIGTYVFGGGTKVTVL

SEQ ID NO: 1049 - protein, 120 aa, Artificial Sequence
  Description of Artificial Sequence: Synthetic polypeptide
QVQLVQSGGGLVQPGGSLRLSCSASGFTFSSYAMHWVRQAPGKGLEWVEVISYDGSNKYYAYSVQGRFTISKNNSKNTLYLQMNSLKAEDTAVYFCARANGCPYQPFYYRGRGTPGTASS

SEQ ID NO: 1050 - protein, 109 aa, Artificial Sequence
  Description of Artificial Sequence: Synthetic polypeptide
HTVLTHPAPAAAYPGQTITISCSATSSDLVGHKFVSWYQQHPGKAPTLVIYEINNRPSGVPDRFSGSIYGNTDSLTVSAGVEDEDDYYCTCYDEDHIYVSQTGTEVAFI

SEQ ID NO: 1051 - protein, 122 aa, Artificial Sequence
  Description of Artificial Sequence: Synthetic polypeptide
QVQLVQSGGGVVQPGRSLRLSCAASGFIFSSYGMHWVRQAPGKGLEWVAVISYDGSNKYYADSVKGRFTISRDNSKNTLYLQMNSLRVEDTAVYYCARCSGGSCYFNGMDVWGQGTMVTVSS

SEQ ID NO: 1052 - protein, 105 aa, Artificial Sequence
  Description of Artificial Sequence: Synthetic polypeptide
DIVMTQTPSTLSASVGDRVTISCRASENVNNWVAWYQQKPGKVPELLMYKASRLEPGVPSRFSGSGSGTEFTLTISNLQPEDFATYYCQQYKSYSFGQGTKVDIK

SEQ ID NO: 1053 - protein, 121 aa, Artificial Sequence; identical to SEQ ID NO: 1005
  Description of Artificial Sequence: Synthetic polypeptide

SEQ ID NO: 1054 - protein, 111 aa, Artificial Sequence
  Description of Artificial Sequence: Synthetic polypeptide
NFMLTQPHSVSESPGKTVTISCTRSSGSIASNYVQWYQQRPGSSPTAVIYAHNQRPSEVPDRFSGSIDISSNSASLTISGLKTEDEADYYCHSYDTNNPVVFGGGTKLTVL

SEQ ID NO: 1055 - protein, 121 aa, Artificial Sequence
  Description of Artificial Sequence: Synthetic polypeptide
EVQLVQSGGGVVQPGRSLTLSCAASGFTFSSYAMHWVRQAPGKGLEWVAVISYDGSNKYYADSVKGRFTISRDNSKNTLYLQMNSLRAEDTAVYYCARDRSGSYWGAFDIWGQGTTVTVSS

SEQ ID NO: 1056 - protein, 108 aa, Artificial Sequence
  Description of Artificial Sequence: Synthetic polypeptide
ETTLTQSPGTLSLSPGERATLSCRASQSVRSNLAWYQQKPGQAPRLLIYGVSTRATGIPARFSGSGSGTDFTLTISRLEPEDFAVYFCQHYGSSPLYTFGQGTKLEIK

SEQ ID NO: 1057 - protein, 118 aa, Artificial Sequence
  Description of Artificial Sequence: Synthetic polypeptide
QVQLVQSGGGVVQPGRSLRLSCAASGFTFSSYGMHWVRQAPGKGLEWVALISYDGSNKYYADSVKGRFTISRDNAKNSLYLQMNSLRAEDTAVYYCARDYGLRYFDYWGQGTLVTVSS

SEQ ID NO: 1058 - protein, 110 aa, Artificial Sequence
  Description of Artificial Sequence: Synthetic polypeptide
QSALTQPPSASGSPGQSVTISCTGTSSDVGSYNRVSWYQQPPGTAPKLMIYEVSNRPSGVPDRFSGSKSGNTASLTISGLQAEDEADYYCSSYTSSSPYVFGTGTKVTVL

SEQ ID NO: 1059 - protein, 123 aa, Artificial Sequence
  Description of Artificial Sequence: Synthetic polypeptide
QVQLVQSGTEVRQPGASVKVSCKASGYTFTSYGISWVRQAPGQGLEWMGGIIPIFGTANYAQKFQGRVTITADESTSTAYMELSSLRSEDTAVYYCARSMVQGVIRFYGMDVWGQGTTVTVSS

SEQ ID NO: 1060 - protein, 109 aa, Artificial Sequence
  Description of Artificial Sequence: Synthetic polypeptide
NFMLTQPHSVSGSPGKTVTISCTRDIGDIARNYVQWYQQRPGSSPTTVIYEDDRRPSGVPDRFSGSVDRSSNSASLTISGLDTEDEADYYCQSYDTTIVFGGGTKLTVL

SEQ ID NO: 1061 - protein, 118 aa, Artificial Sequence
  Description of Artificial Sequence: Synthetic polypeptide
EVQLVQSGGGVVQPGRSLRLSCAASGFTFSSYAMHWVRQAPGKGLEWVAVISYDGSNKYYADSVKGRFTISRDNSKNTLYLQMNSLRAEDTAVYYCARSSNYYYMDVWGKGTLVTVSS

SEQ ID NO: 1062 - protein, 111 aa, Artificial Sequence
  Description of Artificial Sequence: Synthetic polypeptide
QPVLTQPPSVSGAPGQSVTISCIGSSSNIGAGYHVQWYQQVPGTAPKLLIYGNQNRPSGVPDRFSGSKSGTSASLAISGLRSEDEADYFCSAWDDSLGGEVFGTGTKVNVL

SEQ ID NO: 1063 - protein, 122 aa, Artificial Sequence
  Description of Artificial Sequence: Synthetic polypeptide
QVQLVQSGGGVVRPGRSLRLSCAASGFTFSSYALHWVRQAPGKGLEWVAVISYDGSHKYYADSVKGRFTISRDNAKNSLYLQMNSLRAEDTAVYYCARVLGGSYRMGAFDIWGQGTMVTVSS

SEQ ID NO: 1064 - protein, 110 aa, Artificial Sequence
  Description of Artificial Sequence: Synthetic polypeptide
QPGLTQPPSVSKDLRQTATLTCTGNSNNVGHEGAAWLQQHQGHPPKLLSYKNDNRPSGISERFSASTSGNTASLTITGLQPEDEADYYCSAWDSSLGSWVFGGGSRLTVL

SEQ ID NO: 1065 - protein, 121 aa, Artificial Sequence
  Description of Artificial Sequence: Synthetic polypeptide
EVQLVQSGGGVVQPGRSLRLSCAASGFTFSSYAMHWVRQAPGKGLEWVAVISYDGSNKYYADSVKGRFTISRDNSKNTLYLQMNSLRAEDTAIYYCSRDAVAGYRGGFDYWGQGTLVTVSS

SEQ ID NO: 1066 - protein, 107 aa, Artificial Sequence
  Description of Artificial Sequence: Synthetic polypeptide
QPVLTQPPSASGTPGQRVTISCSGGRSNIGSNTVNWYQQLPGTAPKLLIYSNNHRPSGVPDRFSGSKSGNTASLTISGLQAEDEADYYCQSYDSSVVFGGGTKLTVL

SEQ ID NO: 1067 - protein, 119 aa, Artificial Sequence
  Description of Artificial Sequence: Synthetic polypeptide
QVTLKESGPALVKPTQTLTLTCTFSGFSLSTSGVGVGWIRQPPGKALEWLALIYWDDDKRYSPSLKSRLTITKDTSKNQVVLTMTNMDPVDTATYYCAHLDTFYGMDVWGQGTLVTVSS

SEQ ID NO: 1068 - protein, 106 aa, Artificial Sequence
  Description of Artificial Sequence: Synthetic polypeptide
QPVLTQPPSVSVSPGQTASITCSGDNLGEIYASWYQQKPGQSPVLVIYQDKKRPSGIPERFSGSNSGNTATLTISETQAMDEADYYCQAWDSSTGVFGTGTKVTVL

SEQ ID NO: 1069 - protein, 120 aa, Artificial Sequence
  Description of Artificial Sequence: Synthetic polypeptide
QVTLKESGPTLVKPTQTLTLTCTLSGFSLTTSGVGVGWIRQPPGKALEWLALIYWDDDKRYSPSLKSRLTITKDTSKNQVVLTMTNMDPVDTATYYCAHSRGLWGAFDIWGQGTTVTVSS

SEQ ID NO: 1070 - protein, 107 aa, Artificial Sequence
  Description of Artificial Sequence: Synthetic polypeptide
SYELTQPPSVSVSPGQTATITCSGDALPDKYAYWYRQRPGQAPVLVIYKDSERPSGIPERFSGSSSGTTVTLTISGVQAEDEADYYCQSADSSGTWVFGGGTKLTVL

SEQ ID NO: 1071 - protein, 115 aa, Artificial Sequence
  Description of Artificial Sequence: Synthetic polypeptide
QVQLVQSGGGVVQPGRSRRLSCTASGITFYSYGMHWVRQAPGKGLEWVSTISNIYNTHYADSVKGRFTISRDNSKNTLYLQMKSLRAEDTATYYCAKGIAAADYWGQGTLVTVSS

SEQ ID NO: 1072 - protein, 110 aa, Artificial Sequence
  Description of Artificial Sequence: Synthetic polypeptide
QSVLTQPPSASGSPGQSVTISCTGTSSDVGGYNHVSWYQQHPGKAPKVLIYDVSKRPSGVPDRFSGSKSGNTASLTVSGLQAEDEADYYCTSYAGSNSLVFGTGTEVTVL

SEQ ID NO: 1073 - protein, 117 aa, Artificial Sequence
  Description of Artificial Sequence: Synthetic polypeptide
QVQLVQSGGGLVQPGGSLRLSCAASGFTFSSYAMSWVRQAPGKGLEWVSAISGSGGSTYYADSVKGRFTISRDNSKNTLYLQMNSLRAEDTGVYYCANDIQGDPVRWGQGTLVTVSS

SEQ ID NO: 1074 - protein, 110 aa, Artificial Sequence
  Description of Artificial Sequence: Synthetic polypeptide
QSVLTQPPSASGSPGHSVTISCTGTSGDVGGYNSVSWYQHHPGKAPKLMIYEVTKRPSGVPDRFSGSKSGNTASLSVSGLQAEDEADYYCSSYAGSNNYVFGTGTKVTVL

SEQ ID NO: 1075 - protein, 121 aa, Artificial Sequence
  Description of Artificial Sequence: Synthetic polypeptide
QVQLVQSGGGVVQPGRSLRLSCAASGFTFSSYAMHWVRQAPGKGLEWVAVISYDGSNKYYADSVKGRFTISRDNSKNTLYLQMNSLRAEDTAVYYCARARGYSYGHHFDYWGQGTLVTVSS

SEQ ID NO: 1076 - protein, 109 aa, Artificial Sequence
  Description of Artificial Sequence: Synthetic polypeptide
NFMLTQPHSVSESPGKTVAISCTRSSGSIASNYVQWYQQRPGSSPTTVIYEDNQRPSGVPDRFSGSIDSSSNSASLTISGLKTEDEADYYCQSYDSPWVFGGGTKLTVL

SEQ ID NO: 1077 - protein, 120 aa, Artificial Sequence
  Description of Artificial Sequence: Synthetic polypeptide
EVQLVQSGGGVVQPGRSLRLSCAASGFTFSSYGMHWVRQAPGKGLEWVSYISSSSKYIYYADSVKGRFTISRDNAKNSLYLQMNSLRAEDTAVYYCARDADTSSSESDYWGQGTLVTVSS

SEQ ID NO: 1078 - protein, 110 aa, Artificial Sequence
  Description of Artificial Sequence: Synthetic polypeptide
LPMLTQPPSMSGTPGQRVTISCSGSSSNIGSNTVNWYQQVPGTAPKVLIYSNNQRPSGVPDRFSGSKSGTSASLAISGLRSEDEADYSCAVWDDSLNGLVIGGGTKLTVL

SEQ ID NO: 1079 - protein, 116 aa, Artificial Sequence
  Description of Artificial Sequence: Synthetic polypeptide
QVQLVQSGAEVKKPGASVKVSCKASGYTFSSYAFSWVRQAPGQGLEWMGWISAFNGNTDYAQNFQGRVTMTTDTSTNTAYMELRSLRSDDTAVYYCARDGGKLDYWGQGTLVTVSS

SEQ ID NO: 1080 - protein, 110 aa, Artificial Sequence
  Description of Artificial Sequence: Synthetic polypeptide
SYELTQPPSVSKGLRQTATLTCTGNSNNVGHEGASWLQHHQGHPPKLLSYRNKNRPSGISERFSASRSGNTASLTITGLQPEDEADYYCSAWDGRLNGYLFGTGTKVTVL

SEQ ID NO: 1081 - protein, 122 aa, Artificial Sequence
  Description of Artificial Sequence: Synthetic polypeptide
EVQLVQSGAEVKKPGASVKVSCKASGYTFTSYYMHWVRQAPGQGLEWMGIINPSGGSTSYAQKFQGRVTMTRDTSTSTVYMELSSLRSEDTAVYYCARDLPLRYRPNAFDIWGQGTTVTVSS

SEQ ID NO: 1082 - protein, 106 aa, Artificial Sequence
  Description of Artificial Sequence: Synthetic polypeptide
SYELTQPPSVSVSPGQTATITCSGDKLEDKFVSWYQQKPGHSPLLVIYEDAKRPSGIPERFSGSNSGNRAILTINGTQALDEADYYCQAWAITTEVFGGGTKLAVL

SEQ ID NO: 1083 - protein, 126 aa, Artificial Sequence
  Description of Artificial Sequence: Synthetic polypeptide
QVQLVQSGGGVVQPGRSLRLSCAASGFTFSNYAMHWVRQAPGKGLEWVAVISYDGSTEYYADSVKGRFTISRDNSKKMLYLQMNSLTAEDTAVYYCARDPRYCSGAGCYYYGMDVWGQGTTVTVSS

SEQ ID NO: 1084 - protein, 108 aa, Artificial Sequence
  Description of Artificial Sequence: Synthetic polypeptide
ETTLTQSPGTLSLSPGERATLSCRASQSVSSTYLAWYQQKPGQAPRLLIYGASNRATGIPDRFSGSGSGTDFTLTISSLQPEDFATYYCQHSYRTPYTFGQGTKLEIN

SEQ ID NO: 1085 - protein, 117 aa, Artificial Sequence
  Description of Artificial Sequence: Synthetic polypeptide
QVQLVQSGGGLVQPGGSLRLSCAASGFTFSSYEMNWVRQAPGKGLEWVAVISYDGSNKYYADSVKGRFTISRDNSKNTLYLQMNSLRAEDTAVYYCARDPSYGLDYWGQGTLVTVSS

SEQ ID NO: 1086 - protein, 108 aa, Artificial Sequence
  Description of Artificial Sequence: Synthetic polypeptide
DIVMTQSPATLSVSPGERATLSCRASQSVRDGYLAWYQQRPGQAPRLLISGASTRATDIPDRFTGSGSGTDFTLTISSLEPEDFAVYYCQQRSNWPPTFGQGTKVESK

SEQ ID NO: 1087 - protein, 120 aa, Artificial Sequence
  Description of Artificial Sequence: Synthetic polypeptide
QVQLVQSGGGLVKPGGSLRLSCAASGFTFSSYAMHWVRQAPGKGLEWVAVISYDGSNKYYADSVKGRFTISRDNSKNTLYLQMNSLRAEDTAVYYCARDRGGYSGYLDYWGQGTLVTVSS

SEQ ID NO: 1088 - protein, 110 aa, Artificial Sequence
  Description of Artificial Sequence: Synthetic polypeptide
QSVLTQPPSASGSPGQSVTVSCTGTSDDVGGFAHVSWYQQHPGKAPKLLIHDVSKRPSGVPDRFSASKSGNTASLTISGLQPEDEGDYFCSSYAGRNGVIFGGGTTLTVL

SEQ ID NO: 1089 - protein, 125 aa, Artificial Sequence
  Description of Artificial Sequence: Synthetic polypeptide
QVQLVQSGAEVKKPGASVKVSCKASGYTFTGYYMHWVRQAPGQGLEWMGRINPNSGGTNYAQKFQGRVTMTRDTSISTAYMELSRLRSDDTAVYYCARESGLLWFGDYYYGMDVWGQGTTVTVSS

SEQ ID NO: 1090 - protein, 110 aa, Artificial Sequence
  Description of Artificial Sequence: Synthetic polypeptide
QPVLTQPPSVSKDLRQTATLTCTGNSNNVGDQGTAWLQQHQGHPPKLVSYRNNNRPSGVSERFSASRSGNTASLTITGLQAEDEADYYCSAWDSSLSAQVFGGGTKLTVL

SEQ ID NO: 1091 - protein, 120 aa, Artificial Sequence
  Description of Artificial Sequence: Synthetic polypeptide
QVQLQQSGAEVKKPGSSVKVSCKASGSTFNNYAVSWVRQAPGQGPEWMGRIIPIVDIANYAQRFQGRVTITADESTNTAYMELSSLRSEDTAVYYCARGGSQGAYYMDVWGKGTTVTVSS

SEQ ID NO: 1092 - protein, 111 aa, Artificial Sequence
  Description of Artificial Sequence: Synthetic polypeptide
NFMLTQPHSVSESPGKTVTISCTRSSGSIASNYVQWYQQRPGSAPTTVIYEDNQRPSGVPDRFSGSIDSSSKTASLIISGLETEDEADYYCQSYDNNNHVVFGGGTKLTVP

SEQ ID NO: 1093 - protein, 120 aa, Artificial Sequence
  Description of Artificial Sequence: Synthetic polypeptide
EVQLVQSGAEVKKPGASVKVSCKASGYTFTSYGISWVRQAPGQGLEWMGWISAYNGNTNYAQKLQGRVTMTTDTSTSTAYMELRSLRSDDTAVYYCARGGSYGRYGMDVWGQGTTVTVSS

SEQ ID NO: 1094 - protein, 111 aa, Artificial Sequence
  Description of Artificial Sequence: Synthetic polypeptide
QSVLTQPPSVSGAPGQRVTISCTGSSSNIGAGYDVHWYQQLPGTAPKLIIYGNSNRPSGVPDRFSGSKSGTSASLAITGLQAEDEADYYCQSYDSSLSGWVFGGGTKLTVL

SEQ ID NO: 1095 - protein, 122 aa, Artificial Sequence
  Description of Artificial Sequence: Synthetic polypeptide
QVQLVQSGGGVVQPGRSLRLSCAASGFTFSSYAMHWVRQAPGKGLEWVAVISYDGSNKYYADSVKGRFTISRDNSKNTLYLQMNSLRDEDTAVYYCARGLSGTYRATTFDFWGQGTLVTVSS

SEQ ID NO: 1096 - protein, 110 aa, Artificial Sequence
  Description of Artificial Sequence: Synthetic polypeptide
QSALTQPASVSGSPGQSITISCTGTSSDLGGHNFVSWYQQHPASAPKLIIYDVYNRPSGVSNRFSGSESGDTASLTISGLRAEDEADYFCSSYAGSNPYVFGTGTKVTVL

SEQ ID NO: 1097 - protein, 114 aa, Artificial Sequence
  Description of Artificial Sequence: Synthetic polypeptide
QVQLQESGAGLLRPSETLSLTCAVYGGSFSSYHWSWIRQPPGKGLEWIGEIDHYGSPNYNPSFQSRVAMSRDTPKNQFSLKLSSVTAADTAVYYCARGYAFDIWGQGTLVTVSS

SEQ ID NO: 1098 - protein, 110 aa, Artificial Sequence
  Description of Artificial Sequence: Synthetic polypeptide
LPVLTQPPSASETPGQRVTISCSGGRSNIGINSVNWYQQLPGTAPKLLIYRNNQRPSGVPDRFFGSKSGTSASLAISGLQSEDEADYYCAAWDGSLNGPLFGGGTKLTVL

SEQ ID NO: 1099 - protein, 115 aa, Artificial Sequence
  Description of Artificial Sequence: Synthetic polypeptide
QVQLVQSGAEVKKPGESLKISCQGSGYNFNDYWVGWVRQKPGKGLEWMGIIYPGDSDTRKNPSFEGQVTMSVDKSLHSVYLHWTSLKVSDTAKYYCARGYAMDVWGQGTLGTVSS

SEQ ID NO: 1100 - protein, 109 aa, Artificial Sequence
  Description of Artificial Sequence: Synthetic polypeptide
QPVLTQPPSVSGAPGQSVTISCTGSSSNIGNYGVHWYQQLPGTAPKLLIYSNNQRPSGVPDRFSGSKSGTSASLAISGLQSEDEADYYCAAWDDSLKGVFGGGTKVTVL

SEQ ID NO: 1101 - protein, 115 aa, Artificial Sequence
  Description of Artificial Sequence: Synthetic polypeptide
QVQLVQSGAEVKKPGASVKVSCKASGYTFSNYDINWVRQATGQGLEWMGWMNPNSGNTGYAQSFQGRVTFTRDTSINTAYMELSSLRSEDTAVYYCARGYGMDVWGQGTTVTVSS

SEQ ID NO: 1102 - protein, 110 aa, Artificial Sequence
  Description of Artificial Sequence: Synthetic polypeptide
QSVLTQPPSASGTPGGRVTISCSGSTSNIGRNKVYWYQRLPGTAPKLLIYLNNQRPSGVPDRFSGSKSGTSASLAISGLQSEDEADYFCAAWDDSLTGYVFGTGTKVTVL

SEQ ID NO: 1103 - protein, 119 aa, Artificial Sequence
  Description of Artificial Sequence: Synthetic polypeptide
QVQLVQSGAEVKKSGESLEISCKGSGYSFTNYWISWVRQMPGKGLEWMGRIDPRDSYTNYSPSFQGHVTITVDKSTGAAYLHWSSLKASDTGMYYCARHPAGGTSFDMWGQGTMVTVSS

SEQ ID NO: 1104 - protein, 104 aa, Artificial Sequence
  Description of Artificial Sequence: Synthetic polypeptide
SSELTQDPAVSVALGQTVRIICQGDSLSRYYANWYQQKSGQAPILVMYGKDIRPSIPDRFSGSSSGNTASLTITGAQEDEADYYCNSRDSSGNLVRRRIKLTVL

SEQ ID NO: 1105 - protein, 119 aa, Artificial Sequence
  Description of Artificial Sequence: Synthetic polypeptide
EVQLVQSGAEVKKPGESLRISCKGSGYTFTNYWIGWVRQMPGKGLEWMGVIYPGDSDTIYSPSFQGQVTISADKSISTAYLQWSSLKASDTAIYYCARRAGAQGAFDIWGQGTMVTVSS

SEQ ID NO: 1106 - protein, 110 aa, Artificial Sequence
  Description of Artificial Sequence: Synthetic polypeptide
QSALTQPASVSGSPGQSITISCTGTSSDVGGYNYVSWYQQHPGKAPKLMIYDVNYRPSGISHRFSGSKSGNTASLTISGLQAEDEADYYCSSYTSSSTYVFGTGTKVTVL

SEQ ID NO: 1107 - protein, 121 aa, Artificial Sequence
  Description of Artificial Sequence: Synthetic polypeptide
EVQLVESGGGQVKPGGSLRISCAASGFTFENYNMHWVRQAPGKGLEWVSSITGHAYYTYYADSLKGRFNISRDNAKKLLYLQLSSLSAEDTALYFCARSNYASAGHGMDVWGHGTLVTVSS

SEQ ID NO: 1108 - protein, 107 aa, Artificial Sequence
  Description of Artificial Sequence: Synthetic polypeptide
SYELTQPPSVSVSPGQTASITCSGDGLPKHYAYWYQQRPGQAPVLLIYKDTERSSGIPERFSGSGSGTTVTLTINGVQAEDEADYYCQSGDTSGPVVFGGGTKLTVL

SEQ ID NO: 1109 - protein, 116 aa, Artificial Sequence
  Description of Artificial Sequence: Synthetic polypeptide
QVQLVQSGAEVKKPGSSVKVSCKASGYTFTSYGISWVRQAPGQGLELMGWISAYNGNTNYAQKLQGRVTMTTDTSTSTAYMELRSLRSGDTAVYYCARTVGSLDYWGQGTLVTVSS

SEQ ID NO: 1110 - protein, 111 aa, Artificial Sequence
  Description of Artificial Sequence: Synthetic polypeptide
LPVLTQPPSVSGAPGQRVAISCTGSSSNIGRGYNVHWYQQLPGAAPKLLIYGNSNRPSGVPDRFSGSKSGTSASLAISGLRSEDEADYYCSAWDDSLNNVVFGGGTRLTVL

SEQ ID NO: 1111 - protein, 118 aa, Artificial Sequence
  Description of Artificial Sequence: Synthetic polypeptide
EVQLVESGPGLVKPSQTLSLTCTVSGGSISSGGYYWSWIRQHPGKGLEWIGYIYYSGSTYYNPSLKSRVTISVDTSKNQFSLKLSSVTAADTAVYYCARYDRDAFDIWGQGTMVTVSS

SEQ ID NO: 1112 - protein, 108 aa, Artificial Sequence
  Description of Artificial Sequence: Synthetic polypeptide
QSVLTQPPSVSVAPGQTARITCGGDNIGHKGVHWYQQKAGQAPVLVVHDDSDRPSGIPERFSGSNSGNTATLTISRVEAGDEADYYCQVWESYGDHVVFGGGTKLTVL

SEQ ID NO: 1113 - protein, 119 aa, Artificial Sequence
  Description of Artificial Sequence: Synthetic polypeptide
QVQLVQSGGGLVQPGGSLRLSCAASGFTFSSYGMHWVRQAPGKGLEWVAVISYDGSNKYYADSVKGRFTISRDNSKNTLYLQMNSLRAEDTAVYYCATPLGFFGAFDIWGQGTLVTVSS

SEQ ID NO: 1114 - protein, 111 aa, Artificial Sequence
  Description of Artificial Sequence: Synthetic polypeptide
QSVLTQPPSVSGAPGERVTFSCTGTTSNIGAGYDVHWYQQLPGTAPKLLIYDNNIRPSGVPDRFSASKSGTSASLAITGLQSEDEGDYYCQSYDSGLDGSVFGGGTKLTVL

SEQ ID NO: 1115 - protein, 113 aa, Artificial Sequence
  Description of Artificial Sequence: Synthetic polypeptide
EVQLVQSGGGLVQPGGSLRLPCSASGFDFSNYDMHWVRQAPGKGLEHISIITRDGGRTDYAESVKGRFTISRDNSKNTLYLQMTSLREEDTAVYYCDKAGGEWGQGTLVTVSS

SEQ ID NO: 1116 - protein, 110 aa, Artificial Sequence; identical to SEQ ID NO: 1072
  Description of Artificial Sequence: Synthetic polypeptide

SEQ ID NO: 1117 - protein, 120 aa, Artificial Sequence
  Description of Artificial Sequence: Synthetic polypeptide
QVQLVQSGAEVKKPGSSAKVSCKASGGTFNNYAISWVRQAPGQGPEWMGRIIPIVDIANYAQRFQGRVTITADESTNTAYMELSSLRSEDTAVYYCVRGGSQGAYYMDVWGKGTLVTVSS

SEQ ID NO: 1118 - protein, 111 aa, Artificial Sequence
  Description of Artificial Sequence: Synthetic polypeptide
NFMLTQPHSVSESPGKTVTISCTRSSGSIASNYVQWYQQRPGSAPTTVIYEDDQRPSGVPDRFSASIDSSSNSASLTISGLKAEDEADYYCQSYDNNNAVIFGGGTKLTVL

SEQ ID NO: 1119 - protein, 8 aa, Artificial Sequence
  Description of Artificial Sequence: Synthetic peptide
GFTFSSYG

SEQ ID NO: 1120 - protein, 8 aa, Artificial Sequence
  Description of Artificial Sequence: Synthetic peptide
GFTFSGYA

SEQ ID NO: 1121 - protein, 8 aa, Artificial Sequence
  Description of Artificial Sequence: Synthetic peptide
GYNFIDYW

SEQ ID NO: 1122 - protein, 8 aa, Artificial Sequence
  Description of Artificial Sequence: Synthetic peptide
GHTFLGHY

SEQ ID NO: 1123 - protein, 8 aa, Artificial Sequence
  Description of Artificial Sequence: Synthetic peptide
GFTFSIYG

SEQ ID NO: 1124 - protein, 8 aa, Artificial Sequence
  Description of Artificial Sequence: Synthetic peptide
GFNFGTFG

SEQ ID NO: 1125 - protein, 8 aa, Artificial Sequence
  Description of Artificial Sequence: Synthetic peptide
GFIFSSYG

SEQ ID NO: 1126 - protein, 10 aa, Artificial Sequence
  Description of Artificial Sequence: Synthetic peptide
GFSLTTSGVG

SEQ ID NO: 1127 - protein, 8 aa, Artificial Sequence
  Description of Artificial Sequence: Synthetic peptide
GITFYSYG

SEQ ID NO: 1128 - protein, 8 aa, Artificial Sequence
  Description of Artificial Sequence: Synthetic peptide
GYTFSSYA

SEQ ID NO: 1129 - protein, 8 aa, Artificial Sequence
  Description of Artificial Sequence: Synthetic peptide
GYTFTSYY

SEQ ID NO: 1130 - protein, 8 aa, Artificial Sequence
  Description of Artificial Sequence: Synthetic peptide
GFTFSNYA

SEQ ID NO: 1131 - protein, 8 aa, Artificial Sequence
  Description of Artificial Sequence: Synthetic peptide
GFTFSSYE

SEQ ID NO: 1132 - protein, 8 aa, Artificial Sequence
  Description of Artificial Sequence: Synthetic peptide
GYTFTGYY

SEQ ID NO: 1133 - protein, 8 aa, Artificial Sequence
  Description of Artificial Sequence: Synthetic peptide
GSTFNNYA

SEQ ID NO: 1134 - protein, 8 aa, Artificial Sequence
  Description of Artificial Sequence: Synthetic peptide
GGSFSSYH

SEQ ID NO: 1135 - protein, 8 aa, Artificial Sequence
  Description of Artificial Sequence: Synthetic peptide
GYNFNDYW

SEQ ID NO: 1136 - protein, 8 aa, Artificial Sequence
  Description of Artificial Sequence: Synthetic peptide
GYTFSNYD

SEQ ID NO: 1137 - protein, 8 aa, Artificial Sequence
  Description of Artificial Sequence: Synthetic peptide
GYSFTNYW

SEQ ID NO: 1138 - protein, 8 aa, Artificial Sequence
  Description of Artificial Sequence: Synthetic peptide
GYTFTNYW

SEQ ID NO: 1139 - protein, 8 aa, Artificial Sequence
  Description of Artificial Sequence: Synthetic peptide
GFTFENYN

SEQ ID NO: 1140 - protein, 10 aa, Artificial Sequence
  Description of Artificial Sequence: Synthetic peptide
GGSISSGGYY

SEQ ID NO: 1141 - protein, 8 aa, Artificial Sequence
  Description of Artificial Sequence: Synthetic peptide
GFDFSNYD

SEQ ID NO: 1142 - protein, 8 aa, Artificial Sequence
  Description of Artificial Sequence: Synthetic peptide
GGTFNNYA

SEQ ID NO: 1143 - protein, 8 aa, Artificial Sequence
  Description of Artificial Sequence: Synthetic peptide
ISYDGSNK

SEQ ID NO: 1144 - protein, 8 aa, Artificial Sequence
  Description of Artificial Sequence: Synthetic peptide
MSYDGSNK

SEQ ID NO: 1145 - protein, 8 aa, Artificial Sequence
  Description of Artificial Sequence: Synthetic peptide
VSYDGSNK

SEQ ID NO: 1146 - protein, 8 aa, Artificial Sequence
  Description of Artificial Sequence: Synthetic peptide
IYPGDSDA

SEQ ID NO: 1147 - protein, 8 aa, Artificial Sequence
  Description of Artificial Sequence: Synthetic peptide
INPNSGVT

SEQ ID NO: 1148 - protein, 8 aa, Artificial Sequence
  Description of Artificial Sequence: Synthetic peptide
IIPIFGTA

SEQ ID NO: 1149 - protein, 8 aa, Artificial Sequence
  Description of Artificial Sequence: Synthetic peptide
ISYDGSHK

SEQ ID NO: 1150 - protein, 7 aa, Artificial Sequence
  Description of Artificial Sequence: Synthetic peptide
ISNIYNT

SEQ ID NO: 1151 - protein, 8 aa, Artificial Sequence
  Description of Artificial Sequence: Synthetic peptide
ISGSGGST

SEQ ID NO: 1152 - protein, 8 aa, Artificial Sequence
  Description of Artificial Sequence: Synthetic peptide
ISSSSKYI

SEQ ID NO: 1153 - protein, 8 aa, Artificial Sequence
  Description of Artificial Sequence: Synthetic peptide
ISAFNGNT

SEQ ID NO: 1154 - protein, 8 aa, Artificial Sequence
  Description of Artificial Sequence: Synthetic peptide
INPSGGST

SEQ ID NO: 1155 - protein, 8 aa, Artificial Sequence
  Description of Artificial Sequence: Synthetic peptide
ISYDGSTE

SEQ ID NO: 1156 - protein, 8 aa, Artificial Sequence
  Description of Artificial Sequence: Synthetic peptide
IIPIVDIA

SEQ ID NO: 1157 - protein, 7 aa, Artificial Sequence
  Description of Artificial Sequence: Synthetic peptide
IDHYGSP

SEQ ID NO: 1158 - protein, 8 aa, Artificial Sequence
  Description of Artificial Sequence: Synthetic peptide
MNPNSGNT

SEQ ID NO: 1159 - protein, 8 aa, Artificial Sequence
  Description of Artificial Sequence: Synthetic peptide
IDPRDSYT

SEQ ID NO: 1160 - protein, 8 aa, Artificial Sequence
  Description of Artificial Sequence: Synthetic peptide
ITGHAYYT

SEQ ID NO: 1161 - protein, 7 aa, Artificial Sequence
  Description of Artificial Sequence: Synthetic peptide
IYYSGST

SEQ ID NO: 1162 - protein, 8 aa, Artificial Sequence
  Description of Artificial Sequence: Synthetic peptide
ITRDGGRT

SEQ ID NO: 1163 - protein, 14 aa, Artificial Sequence
  Description of Artificial Sequence: Synthetic peptide
ARVNSGSYYGAFDI

SEQ ID NO: 1164 - protein, 13 aa, Artificial Sequence
  Description of Artificial Sequence: Synthetic peptide
ARDGGIQLSSFEY

SEQ ID NO: 1165 - protein, 13 aa, Artificial Sequence
  Description of Artificial Sequence: Synthetic peptide
ARGSGSYLTDFDY

SEQ ID NO: 1166 - protein, 12 aa, Artificial Sequence
  Description of Artificial Sequence: Synthetic peptide
ARTGGYLRPIDY

SEQ ID NO: 1167 - protein, 14 aa, Artificial Sequence
  Description of Artificial Sequence: Synthetic peptide
ARDRSGSYWGAFDI

SEQ ID NO: 1168 - protein, 13 aa, Artificial Sequence
  Description of Artificial Sequence: Synthetic peptide
AKGRGSYSTYFDY

SEQ ID NO: 1169 - protein, 14 aa, Artificial Sequence
  Description of Artificial Sequence: Synthetic peptide
ARSEGYSSGWPLDY

SEQ ID NO: 1170 - protein, 8 aa, Artificial Sequence
  Description of Artificial Sequence: Synthetic peptide
ARGYAMDV

SEQ ID NO: 1171 - protein, 12 aa, Artificial Sequence
  Description of Artificial Sequence: Synthetic peptide
ARERTTGGAFDI

SEQ ID NO: 1172 - protein, 11 aa, Artificial Sequence
  Description of Artificial Sequence: Synthetic peptide
ARGDYYYYMDV

SEQ ID NO: 1173 - protein, 14 aa, Artificial Sequence
  Description of Artificial Sequence: Synthetic peptide
ARGLGGGYYYGMDV

SEQ ID NO: 1174 - protein, 8 aa, Artificial Sequence
  Description of Artificial Sequence: Synthetic peptide
ARGQAMDV

SEQ ID NO: 1175 - protein, 14 aa, Artificial Sequence
  Description of Artificial Sequence: Synthetic peptide
ARGNRGSYYGAFDS

SEQ ID NO: 1176 - protein, 14 aa, Artificial Sequence
  Description of Artificial Sequence: Synthetic peptide
ARDNSGSYYGAFDI

SEQ ID NO: 1177 - protein, 12 aa, Artificial Sequence
  Description of Artificial Sequence: Synthetic peptide
AHRRPDWDAFDV

SEQ ID NO: 1178 - protein, 13 aa, Artificial Sequence
  Description of Artificial Sequence: Synthetic peptide
ARSDGYPYEPFDY

SEQ ID NO: 1179 - protein, 12 aa, Artificial Sequence
  Description of Artificial Sequence: Synthetic peptide
ARGSGITGAFRD

SEQ ID NO: 1180 - protein, 14 aa, Artificial Sequence
  Description of Artificial Sequence: Synthetic peptide
ARPQGGAYNGYFDS

SEQ ID NO: 1181 - protein, 14 aa, Artificial Sequence
  Description of Artificial Sequence: Synthetic peptide
ARSDSGNYYGAFDI

SEQ ID NO: 1182 - protein, 14 aa, Artificial Sequence
  Description of Artificial Sequence: Synthetic peptide
ARVRGSGYPHAFDI

SEQ ID NO: 1183 - protein, 15 aa, Artificial Sequence
  Description of Artificial Sequence: Synthetic peptide
ARYKWEPNVGGAFDI

SEQ ID NO: 1184 - protein, 13 aa, Artificial Sequence
  Description of Artificial Sequence: Synthetic peptide
AKGGSYGRYGMDV

SEQ ID NO: 1185 - protein, 11 aa, Artificial Sequence
  Description of Artificial Sequence: Synthetic peptide
AKMGNAWTFEH

SEQ ID NO: 1186 - protein, 13 aa, Artificial Sequence
  Description of Artificial Sequence: Synthetic peptide
ARANGCPYQPFYY

SEQ ID NO: 1187 - protein, 15 aa, Artificial Sequence
  Description of Artificial Sequence: Synthetic peptide
ARCSGGSCYFNGMDV

SEQ ID NO: 1188 - protein, 11 aa, Artificial Sequence
  Description of Artificial Sequence: Synthetic peptide
ARDYGLRYFDY

SEQ ID NO: 1189 - protein, 16 aa, Artificial Sequence
  Description of Artificial Sequence: Synthetic peptide
ARSMVQGVIRFYGMDV

SEQ ID NO: 1190 - protein, 11 aa, Artificial Sequence
  Description of Artificial Sequence: Synthetic peptide
ARSSNYYYMDV

SEQ ID NO: 1191 - protein, 15 aa, Artificial Sequence
  Description of Artificial Sequence: Synthetic peptide
ARVLGGSYRMGAFDI

SEQ ID NO: 1192 - protein, 14 aa, Artificial Sequence
  Description of Artificial Sequence: Synthetic peptide
SRDAVAGYRGGFDY

SEQ ID NO: 1193 - protein, 11 aa, Artificial Sequence
  Description of Artificial Sequence: Synthetic peptide
AHLDTFYGMDV

SEQ ID NO: 1194 - protein, 12 aa, Artificial Sequence
  Description of Artificial Sequence: Synthetic peptide
AHSRGLWGAFDI

SEQ ID NO: 1195 - protein, 9 aa, Artificial Sequence
  Description of Artificial Sequence: Synthetic peptide
AKGIAAADY

SEQ ID NO: 1196 - protein, 10 aa, Artificial Sequence
  Description of Artificial Sequence: Synthetic peptide
ANDIQGDPVR

SEQ ID NO: 1197 - protein, 14 aa, Artificial Sequence
  Description of Artificial Sequence: Synthetic peptide
ARARGYSYGHHFDY

SEQ ID NO: 1198 - protein, 13 aa, Artificial Sequence
  Description of Artificial Sequence: Synthetic peptide
ARDADTSSSESDY

SEQ ID NO: 1199 - protein, 9 aa, Artificial Sequence
  Description of Artificial Sequence: Synthetic peptide
ARDGGKLDY

SEQ ID NO: 1200 - protein, 15 aa, Artificial Sequence
  Description of Artificial Sequence: Synthetic peptide
ARDLPLRYRPNAFDI

SEQ ID NO: 1201 - protein, 19 aa, Artificial Sequence
  Description of Artificial Sequence: Synthetic peptide
ARDPRYCSGAGCYYYGMDV

SEQ ID NO: 1202 - protein, 10 aa, Artificial Sequence
  Description of Artificial Sequence: Synthetic peptide
ARDPSYGLDY

SEQ ID NO: 1203 - protein, 13 aa, Artificial Sequence
  Description of Artificial Sequence: Synthetic peptide
ARDRGGYSGYLDY

SEQ ID NO: 1204 - protein, 18 aa, Artificial Sequence
  Description of Artificial Sequence: Synthetic peptide
ARESGLLWFGDYYYGMDV

SEQ ID NO: 1205 - protein, 13 aa, Artificial Sequence
  Description of Artificial Sequence: Synthetic peptide
ARGGSQGAYYMDV

SEQ ID NO: 1206 - protein, 13 aa, Artificial Sequence
  Description of Artificial Sequence: Synthetic peptide
ARGGSYGRYGMDV

SEQ ID NO: 1207 - protein, 15 aa, Artificial Sequence
  Description of Artificial Sequence: Synthetic peptide
ARGLSGTYRATTFDF

SEQ ID NO: 1208 - protein, 8 aa, Artificial Sequence
  Description of Artificial Sequence: Synthetic peptide
ARGYAFDI

SEQ ID NO: 1209 - protein, 8 aa, Artificial Sequence
  Description of Artificial Sequence: Synthetic peptide
ARGYGMDV

SEQ ID NO: 1210 - protein, 12 aa, Artificial Sequence
  Description of Artificial Sequence: Synthetic peptide
ARHPAGGTSFDM

SEQ ID NO: 1211 - protein, 12 aa, Artificial Sequence
  Description of Artificial Sequence: Synthetic peptide
ARRAGAQGAFDI

SEQ ID NO: 1212 - protein, 14 aa, Artificial Sequence
  Description of Artificial Sequence: Synthetic peptide
ARSNYASAGHGMDV

SEQ ID NO: 1213 - protein, 9 aa, Artificial Sequence
  Description of Artificial Sequence: Synthetic peptide
ARTVGSLDY

SEQ ID NO: 1214 - protein, 10 aa, Artificial Sequence
  Description of Artificial Sequence: Synthetic peptide
ARYDRDAFDI

SEQ ID NO: 1215 - protein, 10 aa, Artificial Sequence
  Description of Artificial Sequence: Synthetic peptide
ASGSYAQFDY

SEQ ID NO: 1216 - protein, 12 aa, Artificial Sequence
  Description of Artificial Sequence: Synthetic peptide
ATPLGFFGAFDI

SEQ ID NO: 1217 - protein, 6 aa, Artificial Sequence
  Description of Artificial Sequence: Synthetic peptide
DKAGGE

SEQ ID NO: 1218 - protein, 13 aa, Artificial Sequence
  Description of Artificial Sequence: Synthetic peptide
VRGGSQGAYYMDV

SEQ ID NO: 1219 - protein, 8 aa, Artificial Sequence
  Description of Artificial Sequence: Synthetic peptide
SGDIATRH

SEQ ID NO: 1220 - protein, 7 aa, Artificial Sequence
  Description of Artificial Sequence: Synthetic peptide
QIVTNNN

SEQ ID NO: 1221 - protein, 9 aa, Artificial Sequence
  Description of Artificial Sequence: Synthetic peptide
SSDVGRYKY

SEQ ID NO: 1222 - protein, 7 aa, Artificial Sequence
  Description of Artificial Sequence: Synthetic peptide
QNVPSNS

SEQ ID NO: 1223 - protein, 6 aa, Artificial Sequence
  Description of Artificial Sequence: Synthetic peptide
SLGTYY

SEQ ID NO: 1224 - protein, 8 aa, Artificial Sequence
  Description of Artificial Sequence: Synthetic peptide
QSNIGSNT

SEQ ID NO: 1225 - protein, 8 aa, Artificial Sequence
  Description of Artificial Sequence: Synthetic peptide
SGDIATKH

SEQ ID NO: 1226 - protein, 7 aa, Artificial Sequence
  Description of Artificial Sequence: Synthetic peptide
QSISSSY

SEQ ID NO: 1227 - protein, 6 aa, Artificial Sequence
  Description of Artificial Sequence: Synthetic peptide
SLTIFF

SEQ ID NO: 1228 - protein, 9 aa, Artificial Sequence
  Description of Artificial Sequence: Synthetic peptide
SSDLGGHNF

SEQ ID NO: 1229 - protein, 9 aa, Artificial Sequence
  Description of Artificial Sequence: Synthetic peptide
SSDVGSYNL

SEQ ID NO: 1230 - protein, 6 aa, Artificial Sequence
  Description of Artificial Sequence: Synthetic peptide
QSVSTN

SEQ ID NO: 1231 - protein, 6 aa, Artificial Sequence
  Description of Artificial Sequence: Synthetic peptide
ALPNRY

SEQ ID NO: 1232 - protein, 9 aa, Artificial Sequence
  Description of Artificial Sequence: Synthetic peptide
SSDLVGHKF

SEQ ID NO: 1233 - protein, 6 aa, Artificial Sequence
  Description of Artificial Sequence: Synthetic peptide
ENVNNW

SEQ ID NO: 1234 - protein, 6 aa, Artificial Sequence
  Description of Artificial Sequence: Synthetic peptide
QSVRSN

SEQ ID NO: 1235 - protein, 9 aa, Artificial Sequence
  Description of Artificial Sequence: Synthetic peptide
SSDVGSYNR

SEQ ID NO: 1236 - protein, 8 aa, Artificial Sequence
  Description of Artificial Sequence: Synthetic peptide
IGDIARNY

SEQ ID NO: 1237 - protein, 9 aa, Artificial Sequence
  Description of Artificial Sequence: Synthetic peptide
SSNIGAGYH

SEQ ID NO: 1238 - protein, 8 aa, Artificial Sequence
  Description of Artificial Sequence: Synthetic peptide
SNNVGHEG

SEQ ID NO: 1239 - protein, 8 aa, Artificial Sequence
  Description of Artificial Sequence: Synthetic peptide
RSNIGSNT

SEQ ID NO: 1240 - protein, 6 aa, Artificial Sequence
  Description of Artificial Sequence: Synthetic peptide
NLGEIY

SEQ ID NO: 1241 - protein, 6 aa, Artificial Sequence
  Description of Artificial Sequence: Synthetic peptide
ALPDKY

SEQ ID NO: 1242 - protein, 9 aa, Artificial Sequence
  Description of Artificial Sequence: Synthetic peptide
SSDVGGYNH

SEQ ID NO: 1243 - protein, 9 aa, Artificial Sequence
  Description of Artificial Sequence: Synthetic peptide
SGDVGGYNS

SEQ ID NO: 1244 - protein, 6 aa, Artificial Sequence
  Description of Artificial Sequence: Synthetic peptide
KLEDKF

SEQ ID NO: 1245 - protein, 7 aa, Artificial Sequence
  Description of Artificial Sequence: Synthetic peptide
QSVSSTY

SEQ ID NO: 1246 - protein, 7 aa, Artificial Sequence
  Description of Artificial Sequence: Synthetic peptide
QSVRDGY

SEQ ID NO: 1247 - protein, 9 aa, Artificial Sequence
  Description of Artificial Sequence: Synthetic peptide
SDDVGGFAH

SEQ ID NO: 1248 - protein, 8 aa, Artificial Sequence
  Description of Artificial Sequence: Synthetic peptide
SNNVGDQG

SEQ ID NO: 1249 - protein, 8 aa, Artificial Sequence
  Description of Artificial Sequence: Synthetic peptide
RSNIGINS

SEQ ID NO: 1250 - protein, 8 aa, Artificial Sequence
  Description of Artificial Sequence: Synthetic peptide
SSNIGNYG

SEQ ID NO: 1251 - protein, 8 aa, Artificial Sequence
  Description of Artificial Sequence: Synthetic peptide
TSNIGRNK

SEQ ID NO: 1252 - protein, 6 aa, Artificial Sequence
  Description of Artificial Sequence: Synthetic peptide
SLSRYY

SEQ ID NO: 1253 - protein, 6 aa, Artificial Sequence
  Description of Artificial Sequence: Synthetic peptide
GLPKHY

SEQ ID NO: 1254 - protein, 9 aa, Artificial Sequence
  Description of Artificial Sequence: Synthetic peptide
SSNIGRGYN

SEQ ID NO: 1255 - protein, 6 aa, Artificial Sequence
  Description of Artificial Sequence: Synthetic peptide
NIGHKG

SEQ ID NO: 1256 - protein, 11 aa, Artificial Sequence
  Description of Artificial Sequence: Synthetic peptide
QSLLHSNGYNY

SEQ ID NO: 1257 - protein, 9 aa, Artificial Sequence
  Description of Artificial Sequence: Synthetic peptide
TSNIGAGYD

SEQ ID NO: 1258 - protein, 3 aa, Artificial Sequence
  Description of Artificial Sequence: Synthetic peptide
ESN

SEQ ID NO: 1259 - protein, 3 aa, Artificial Sequence
  Description of Artificial Sequence: Synthetic peptide
GAS

SEQ ID NO: 1260 - protein, 3 aa, Artificial Sequence
  Description of Artificial Sequence: Synthetic peptide
EVN

SEQ ID NO: 1261 - protein, 3 aa, Artificial Sequence
  Description of Artificial Sequence: Synthetic peptide
VNN

SEQ ID NO: 1262 - protein, 3 aa, Artificial Sequence
  Description of Artificial Sequence: Synthetic peptide
GDN

SEQ ID NO: 1263 - protein, 3 aa, Artificial Sequence
  Description of Artificial Sequence: Synthetic peptide
DND

SEQ ID NO: 1264 - protein, 3 aa, Artificial Sequence
  Description of Artificial Sequence: Synthetic peptide
DAS

SEQ ID NO: 1265 - protein, 3 aa, Artificial Sequence
  Description of Artificial Sequence: Synthetic peptide
KDT

SEQ ID NO: 1266 - protein, 3 aa, Artificial Sequence
  Description of Artificial Sequence: Synthetic peptide
GVN

SEQ ID NO: 1267 - protein, 3 aa, Artificial Sequence
  Description of Artificial Sequence: Synthetic peptide
DDT

SEQ ID NO: 1268 - protein, 3 aa, Artificial Sequence
  Description of Artificial Sequence: Synthetic peptide
GGN

SEQ ID NO: 1269 - protein, 3 aa, Artificial Sequence
  Description of Artificial Sequence: Synthetic peptide
GNS

SEQ ID NO: 1270 - protein, 3 aa, Artificial Sequence
  Description of Artificial Sequence: Synthetic peptide
KDS

SEQ ID NO: 1271 - protein, 3 aa, Artificial Sequence
  Description of Artificial Sequence: Synthetic peptide
EIN

SEQ ID NO: 1272 - protein, 3 aa, Artificial Sequence
  Description of Artificial Sequence: Synthetic peptide
KAS

SEQ ID NO: 1273 - protein, 3 aa, Artificial Sequence
  Description of Artificial Sequence: Synthetic peptide
AHN

SEQ ID NO: 1274 - protein, 3 aa, Artificial Sequence
  Description of Artificial Sequence: Synthetic peptide
GVS

SEQ ID NO: 1275 - protein, 3 aa, Artificial Sequence
  Description of Artificial Sequence: Synthetic peptide
EDD

SEQ ID NO: 1276 - protein, 3 aa, Artificial Sequence
  Description of Artificial Sequence: Synthetic peptide
GNQ

SEQ ID NO: 1277 - protein, 3 aa, Artificial Sequence
  Description of Artificial Sequence: Synthetic peptide
KND

SEQ ID NO: 1278 - protein, 3 aa, Artificial Sequence
  Description of Artificial Sequence: Synthetic peptide
EVT

SEQ ID NO: 1279 - protein, 3 aa, Artificial Sequence
  Description of Artificial Sequence: Synthetic peptide
RNK

SEQ ID NO: 1280 - protein, 3 aa, Artificial Sequence
  Description of Artificial Sequence: Synthetic peptide
EDA

SEQ ID NO: 1281 - protein, 3 aa, Artificial Sequence
  Description of Artificial Sequence: Synthetic peptide
DVY

SEQ ID NO: 1282 - protein, 3 aa, Artificial Sequence
  Description of Artificial Sequence: Synthetic peptide
LNN

SEQ ID NO: 1283 - protein, 3 aa, Artificial Sequence
  Description of Artificial Sequence: Synthetic peptide
GKD

SEQ ID NO: 1284 - protein, 3 aa, Artificial Sequence
  Description of Artificial Sequence: Synthetic peptide
FGS

SEQ ID NO: 1285 - protein, 10 aa, Artificial Sequence
  Description of Artificial Sequence: Synthetic peptide
QSYDSTNPWV

SEQ ID NO: 1286 - protein, 11 aa, Artificial Sequence
  Description of Artificial Sequence: Synthetic peptide
SSYAGTRKYYV

SEQ ID NO: 1287 - protein, 9 aa, Artificial Sequence
  Description of Artificial Sequence: Synthetic peptide
QQYYYWPLS

SEQ ID NO: 1288 - protein, 10 aa, Artificial Sequence
  Description of Artificial Sequence: Synthetic peptide
SSFSQTNSYV

SEQ ID NO: 1289 - protein, 11 aa, Artificial Sequence
  Description of Artificial Sequence: Synthetic peptide
SSYAGSNNPYV

SEQ ID NO: 1290 - protein, 10 aa, Artificial Sequence
  Description of Artificial Sequence: Synthetic peptide
QLYDRSSQLA

SEQ ID NO: 1291 - protein, 10 aa, Artificial Sequence
  Description of Artificial Sequence: Synthetic peptide
NSRNNSGYHE

SEQ ID NO: 1292 - protein, 10 aa, Artificial Sequence
  Description of Artificial Sequence: Synthetic peptide
SSYAGSNDYV

SEQ ID NO: 1293 - protein, 10 aa, Artificial Sequence
  Description of Artificial Sequence: Synthetic peptide
QSFDGSYHWV

SEQ ID NO: 1294 - protein, 11 aa, Artificial Sequence
  Description of Artificial Sequence: Synthetic peptide
ATWDDGLSGRV

SEQ ID NO: 1295 - protein, 12 aa, Artificial Sequence
  Description of Artificial Sequence: Synthetic peptide
NSRDSSGNHLRV

SEQ ID NO: 1296 - protein, 11 aa, Artificial Sequence
  Description of Artificial Sequence: Synthetic peptide
SAWDNSLGAWV

SEQ ID NO: 1297 - protein, 10 aa, Artificial Sequence
  Description of Artificial Sequence: Synthetic peptide
LTYDITNPWV

SEQ ID NO: 1298 - protein, 10 aa, Artificial Sequence
  Description of Artificial Sequence: Synthetic peptide
SYDDSTNPCV

SEQ ID NO: 1299 - protein, 9 aa, Artificial Sequence
  Description of Artificial Sequence: Synthetic peptide
QQRGNWPLT

SEQ ID NO: 1300 - protein, 11 aa, Artificial Sequence
  Description of Artificial Sequence: Synthetic peptide
QSADTSGTLKV

SEQ ID NO: 1301 - protein, 10 aa, Artificial Sequence
  Description of Artificial Sequence: Synthetic peptide
SSYEATHIYV

SEQ ID NO: 1302 - protein, 11 aa, Artificial Sequence
  Description of Artificial Sequence: Synthetic peptide
SSFSSGSIPYV

SEQ ID NO: 1303 - protein, 9 aa, Artificial Sequence
  Description of Artificial Sequence: Synthetic peptide
QHYANWPRT

SEQ ID NO: 1304 - protein, 11 aa, Artificial Sequence
  Description of Artificial Sequence: Synthetic peptide
ATWDDSLNGPV

SEQ ID NO: 1305 - protein, 12 aa, Artificial Sequence
  Description of Artificial Sequence: Synthetic peptide
QVWDTSSDHPYV

SEQ ID NO: 1306 - protein, 10 aa, Artificial Sequence
  Description of Artificial Sequence: Synthetic peptide
SSRATSAFYV

SEQ ID NO: 1307 - protein, 11 aa, Artificial Sequence
  Description of Artificial Sequence: Synthetic peptide
QSYDSSLSGWV

SEQ ID NO: 1308 - protein, 10 aa, Artificial Sequence
  Description of Artificial Sequence: Synthetic peptide
QSVNTIGTYV

SEQ ID NO: 1309 - protein, 10 aa, Artificial Sequence
  Description of Artificial Sequence: Synthetic peptide
TCYDEDHIYV

SEQ ID NO: 1310 - protein, 7 aa, Artificial Sequence
  Description of Artificial Sequence: Synthetic peptide
QQYKSYS

SEQ ID NO: 1311 - protein, 10 aa, Artificial Sequence
  Description of Artificial Sequence: Synthetic peptide
HSYDTNNPVV

SEQ ID NO: 1312 - protein, 10 aa, Artificial Sequence
  Description of Artificial Sequence: Synthetic peptide
QHYGSSPLYT

SEQ ID NO: 1313 - protein, 10 aa, Artificial Sequence
  Description of Artificial Sequence: Synthetic peptide
SSYTSSSPYV

SEQ ID NO: 1314 - protein, 8 aa, Artificial Sequence
  Description of Artificial Sequence: Synthetic peptide
QSYDTTIV

SEQ ID NO: 1315 - protein, 11 aa, Artificial Sequence
  Description of Artificial Sequence: Synthetic peptide
SAWDDSLGGEV

SEQ ID NO: 1316 - protein, 11 aa, Artificial Sequence
  Description of Artificial Sequence: Synthetic peptide
SAWDSSLGSWV

SEQ ID NO: 1317 - protein, 8 aa, Artificial Sequence
  Description of Artificial Sequence: Synthetic peptide
QSYDSSVV

SEQ ID NO: 1318 - protein, 9 aa, Artificial Sequence
  Description of Artificial Sequence: Synthetic peptide
QAWDSSTGV

SEQ ID NO: 1319 - protein, 10 aa, Artificial Sequence
  Description of Artificial Sequence: Synthetic peptide
QSADSSGTWV

SEQ ID NO: 1320 - protein, 10 aa, Artificial Sequence
  Description of Artificial Sequence: Synthetic peptide
TSYAGSNSLV

SEQ ID NO: 1321 - protein, 10 aa, Artificial Sequence
  Description of Artificial Sequence: Synthetic peptide
SSYAGSNNYV

SEQ ID NO: 1322 - protein, 8 aa, Artificial Sequence
  Description of Artificial Sequence: Synthetic peptide
QSYDSPWV

SEQ ID NO: 1323 - protein, 11 aa, Artificial Sequence
  Description of Artificial Sequence: Synthetic peptide
AVWDDSLNGLV

SEQ ID NO: 1324 - protein, 11 aa, Artificial Sequence
  Description of Artificial Sequence: Synthetic peptide
SAWDGRLNGYL

SEQ ID NO: 1325 - protein, 9 aa, Artificial Sequence
  Description of Artificial Sequence: Synthetic peptide
QAWAITTEV

SEQ ID NO: 1326 - protein, 9 aa, Artificial Sequence
  Description of Artificial Sequence: Synthetic peptide
QHSYRTPYT

SEQ ID NO: 1327 - protein, 9 aa, Artificial Sequence
  Description of Artificial Sequence: Synthetic peptide
QQRSNWPPT

SEQ ID NO: 1328 - protein, 10 aa, Artificial Sequence
  Description of Artificial Sequence: Synthetic peptide
SSYAGRNGVI

SEQ ID NO: 1329 - protein, 11 aa, Artificial Sequence
  Description of Artificial Sequence: Synthetic peptide
SAWDSSLSAQV

SEQ ID NO: 1330 - protein, 10 aa, Artificial Sequence
  Description of Artificial Sequence: Synthetic peptide
QSYDNNNHVV

SEQ ID NO: 1331 - protein, 10 aa, Artificial Sequence
  Description of Artificial Sequence: Synthetic peptide
SSYAGSNPYV

SEQ ID NO: 1332 - protein, 11 aa, Artificial Sequence
  Description of Artificial Sequence: Synthetic peptide
AAWDGSLNGPL

SEQ ID NO: 1333 - protein, 10 aa, Artificial Sequence
  Description of Artificial Sequence: Synthetic peptide
AAWDDSLKGV

SEQ ID NO: 1334 - protein, 9 aa, Artificial Sequence
  Description of Artificial Sequence: Synthetic peptide
NSRDSSGNL

SEQ ID NO: 1335 - protein, 10 aa, Artificial Sequence
  Description of Artificial Sequence: Synthetic peptide
QSGDTSGPVV

SEQ ID NO: 1336 - protein, 11 aa, Artificial Sequence
  Description of Artificial Sequence: Synthetic peptide
SAWDDSLNNVV

SEQ ID NO: 1337 - protein, 11 aa, Artificial Sequence
  Description of Artificial Sequence: Synthetic peptide
QVWESYGDHVV

SEQ ID NO: 1338 - protein, 10 aa, Artificial Sequence
  Description of Artificial Sequence: Synthetic peptide
MQVLQTPPIT

SEQ ID NO: 1339 - protein, 11 aa, Artificial Sequence
  Description of Artificial Sequence: Synthetic peptide
QSYDSGLDGSV

SEQ ID NO: 1340 - protein, 10 aa, Artificial Sequence
  Description of Artificial Sequence: Synthetic peptide
QSYDNNNAVI

SEQ ID NO: 1341 - protein, 25 aa, Artificial Sequence
  Description of Artificial Sequence: Synthetic peptide
EVQLVQSGGGVVQPGRSLRLSCAAS

SEQ ID NO: 1342 - protein, 25 aa, Artificial Sequence
  Description of Artificial Sequence: Synthetic peptide
QVELVQSGAEVKEPGASVKVSCKDS

SEQ ID NO: 1343 - protein, 25 aa, Artificial Sequence
  Description of Artificial Sequence: Synthetic peptide
QVQLQESGGGVVQPGRSLRLSCAAS

SEQ ID NO: 1344 - protein, 113 aa, Artificial Sequence
  Description of Artificial Sequence: Synthetic polypeptide
DIVMTQSPLSLPVTPGEPASISCRSSQSLLHSNGYNYLDWYLQKPGQSPQLLIHFGSNRASGVPDRFSGSGSDTDFTLKISRVEAEDVGVYYCMQVLQTPPITFGQGTRLDIK

SEQ ID NO: 1345 - protein, 25 aa, Artificial Sequence
  Description of Artificial Sequence: Synthetic peptide
QVQLVQSGGGLVKPGGSLRLSCSAS

SEQ ID NO: 1346 - protein, 25 aa, Artificial Sequence
  Description of Artificial Sequence: Synthetic peptide
QVQLQESGGGVVQPGRALRLSCRAS

SEQ ID NO: 1347 - protein, 25 aa, Artificial Sequence
  Description of Artificial Sequence: Synthetic peptide
QVQLVQSGGGLVQPGGSLRLSCSAS

SEQ ID NO: 1348 - protein, 25 aa, Artificial Sequence
  Description of Artificial Sequence: Synthetic peptide
EVQLVQSGGGVVQPGRSLTLSCAAS

SEQ ID NO: 1349 - protein, 25 aa, Artificial Sequence
  Description of Artificial Sequence: Synthetic peptide
QVQLVQSGTEVRQPGASVKVSCKAS

SEQ ID NO: 1350 - protein, 25 aa, Artificial Sequence
  Description of Artificial Sequence: Synthetic peptide
QVQLVQSGGGVVRPGRSLRLSCAAS

SEQ ID NO: 1351 - protein, 25 aa, Artificial Sequence
  Description of Artificial Sequence: Synthetic peptide
QVTLKESGPALVKPTQTLTLTCTFS

SEQ ID NO: 1352 - protein, 25 aa, Artificial Sequence
  Description of Artificial Sequence: Synthetic peptide
QVQLVQSGGGVVQPGRSRRLSCTAS

SEQ ID NO: 1353 - protein, 25 aa, Artificial Sequence
  Description of Artificial Sequence: Synthetic peptide
QVQLQQSGAEVKKPGSSVKVSCKAS

SEQ ID NO: 1354 - protein, 25 aa, Artificial Sequence
  Description of Artificial Sequence: Synthetic peptide
QVQLQESGAGLLRPSETLSLTCAVY

SEQ ID NO: 1355 - protein, 25 aa, Artificial Sequence
  Description of Artificial Sequence: Synthetic peptide
QVQLVQSGAEVKKPGESLKISCQGS

SEQ ID NO: 1356 - protein, 25 aa, Artificial Sequence
  Description of Artificial Sequence: Synthetic peptide
QVQLVQSGAEVKKSGESLEISCKGS

SEQ ID NO: 1357 - protein, 25 aa, Artificial Sequence
  Description of Artificial Sequence: Synthetic peptide
EVQLVQSGAEVKKPGESLRISCKGS

SEQ ID NO: 1358 - protein, 25 aa, Artificial Sequence
  Description of Artificial Sequence: Synthetic peptide
EVQLVESGGGQVKPGGSLRISCAAS

SEQ ID NO: 1359 - protein, 25 aa, Artificial Sequence
  Description of Artificial Sequence: Synthetic peptide
EVQLVESGPGLVKPSQTLSLTCTVS

SEQ ID NO: 1360 - protein, 25 aa, Artificial Sequence
  Description of Artificial Sequence: Synthetic peptide
EVQLVQSGGGLVQPGGSLRLPCSAS

SEQ ID NO: 1361 - protein, 25 aa, Artificial Sequence
  Description of Artificial Sequence: Synthetic peptide
QVQLVQSGAEVKKPGSSAKVSCKAS

SEQ ID NO: 1362 - protein, 17 aa, Artificial Sequence
  Description of Artificial Sequence: Synthetic peptide
IAWVRQLPGQGLEWMGI

SEQ ID NO: 1363 - protein, 17 aa, Artificial Sequence
  Description of Artificial Sequence: Synthetic peptide
MHWVRQAPGQGLEWMGW

SEQ ID NO: 1364 - protein, 17 aa, Artificial Sequence
  Description of Artificial Sequence: Synthetic peptide
MHWVRQAPGKGLEWVAG

SEQ ID NO: 1365 - protein, 17 aa, Artificial Sequence
  Description of Artificial Sequence: Synthetic peptide
MHWVRQAPGKGLEWVEV

SEQ ID NO: 1366 - protein, 17 aa, Artificial Sequence
  Description of Artificial Sequence: Synthetic peptide
LHWVRQAPGKGLEWVAV

SEQ ID NO: 1367 - protein, 17 aa, Artificial Sequence
  Description of Artificial Sequence: Synthetic peptide
MHWVRQAPGKGLEWVST

SEQ ID NO: 1368 - protein, 17 aa, Artificial Sequence
  Description of Artificial Sequence: Synthetic peptide
MSWVRQAPGKGLEWVSA

SEQ ID NO: 1369 - protein, 17 aa, Artificial Sequence
  Description of Artificial Sequence: Synthetic peptide
MHWVRQAPGKGLEWVSY

SEQ ID NO: 1370 - protein, 17 aa, Artificial Sequence
  Description of Artificial Sequence: Synthetic peptide
FSWVRQAPGQGLEWMGW

SEQ ID NO: 1371 - protein, 17 aa, Artificial Sequence
  Description of Artificial Sequence: Synthetic peptide
MHWVRQAPGQGLEWMGI

SEQ ID NO: 1372 - protein, 17 aa, Artificial Sequence
  Description of Artificial Sequence: Synthetic peptide
MNWVRQAPGKGLEWVAV

SEQ ID NO: 1373 - protein, 17 aa, Artificial Sequence
  Description of Artificial Sequence: Synthetic peptide
MHWVRQAPGQGLEWMGR

SEQ ID NO: 1374 - protein, 17 aa, Artificial Sequence
  Description of Artificial Sequence: Synthetic peptide
VSWVRQAPGQGPEWMGR

SEQ ID NO: 1375 - protein, 17 aa, Artificial Sequence
  Description of Artificial Sequence: Synthetic peptide
WSWIRQPPGKGLEWIGE

SEQ ID NO: 1376 - protein, 17 aa, Artificial Sequence
  Description of Artificial Sequence: Synthetic peptide
VGWVRQKPGKGLEWMGI

SEQ ID NO: 1377 - protein, 17 aa, Artificial Sequence
  Description of Artificial Sequence: Synthetic peptide
INWVRQATGQGLEWMGW

SEQ ID NO: 1378 - protein, 17 aa, Artificial Sequence
  Description of Artificial Sequence: Synthetic peptide
ISWVRQMPGKGLEWMGR

SEQ ID NO: 1379 - protein, 17 aa, Artificial Sequence
  Description of Artificial Sequence: Synthetic peptide
IGWVRQMPGKGLEWMGV

SEQ ID NO: 1380 - protein, 17 aa, Artificial Sequence
  Description of Artificial Sequence: Synthetic peptide
MHWVRQAPGKGLEWVSS

SEQ ID NO: 1381 - protein, 17 aa, Artificial Sequence
  Description of Artificial Sequence: Synthetic peptide
ISWVRQAPGQGLELMGW

SEQ ID NO: 1382 - protein, 17 aa, Artificial Sequence
  Description of Artificial Sequence: Synthetic peptide
WSWIRQHPGKGLEWIGY

SEQ ID NO: 1383 - protein, 17 aa, Artificial Sequence
  Description of Artificial Sequence: Synthetic peptide
MHWVRQAPGKGLEHISI

SEQ ID NO: 1384 - protein, 17 aa, Artificial Sequence
  Description of Artificial Sequence: Synthetic peptide
ISWVRQAPGQGPEWMGR

SEQ ID NO: 1385 - protein, 38 aa, Artificial Sequence
  Description of Artificial Sequence: Synthetic polypeptide
YYADSVKGRFTISRDNSKNTLYLQMNSLRAEDTAVYYC

SEQ ID NO: 1386 - protein, 38 aa, Artificial Sequence
  Description of Artificial Sequence: Synthetic polypeptide
GYADSVKGRFTISRDNAKNSLYLQMDSLRAEDTAVYYC

SEQ ID NO: 1387 - protein, 38 aa, Artificial Sequence
  Description of Artificial Sequence: Synthetic polypeptide
YYADSVKGRFTISRDNAKNSLYLQMNSLRDEDTAVYYC

SEQ ID NO: 1388 - protein, 38 aa, Artificial Sequence
  Description of Artificial Sequence: Synthetic polypeptide
RYSPSFQGQVTISADKSINTAYLQWSRLKASDTAKYYC

SEQ ID NO: 1389 - protein, 38 aa, Artificial Sequence
  Description of Artificial Sequence: Synthetic polypeptide
KYAEKFQGWVTMTRDTSISTAYMELSRLKSDDTALYYC

SEQ ID NO: 1390 - protein, 38 aa, Artificial Sequence
  Description of Artificial Sequence: Synthetic polypeptide
RYSPSLKSRLTISKDTSRNQVVLTMTNMDPADTGTYYC

SEQ ID NO: 1391 - protein, 38 aa, Artificial Sequence
  Description of Artificial Sequence: Synthetic polypeptide
YYADSVQGRITISRDNSKNTLYLQMNSLRAEDTAVYFC

SEQ ID NO: 1392 - protein, 38 aa, Artificial Sequence
  Description of Artificial Sequence: Synthetic polypeptide
YYADSVKGRFTISRDNSKNTLYLQMNSLRTEDTAVYYC

SEQ ID NO: 1393 - protein, 38 aa, Artificial Sequence
  Description of Artificial Sequence: Synthetic polypeptide
NYAQKFQGRVTITADKSTSTAYMELSSLRSEDTAVYYC

SEQ ID NO: 1394 - protein, 38 aa, Artificial Sequence
  Description of Artificial Sequence: Synthetic polypeptide
NYAQKLQGRVTMTTNTSTNTAYMELRSLRSDDTAGYYW

SEQ ID NO: 1395 - protein, 38 aa, Artificial Sequence
  Description of Artificial Sequence: Synthetic polypeptide
YYAYSVQGRFTISKNNSKNTLYLQMNSLKAEDTAVYFC

SEQ ID NO: 1396 - protein, 38 aa, Artificial Sequence
  Description of Artificial Sequence: Synthetic polypeptide
YYADSVKGRFTISRDNSKNTLYLQMNSLRVEDTAVYYC

SEQ ID NO: 1397 - protein, 38 aa, Artificial Sequence
  Description of Artificial Sequence: Synthetic polypeptide
YYADSVKGRFTISRDNAKNSLYLQMNSLRAEDTAVYYC

SEQ ID NO: 1398 - protein, 38 aa, Artificial Sequence
  Description of Artificial Sequence: Synthetic polypeptide
NYAQKFQGRVTITADESTSTAYMELSSLRSEDTAVYYC

SEQ ID NO: 1399 - protein, 38 aa, Artificial Sequence
  Description of Artificial Sequence: Synthetic polypeptide
YYADSVKGRFTISRDNSKNTLYLQMNSLRAEDTAIYYC

SEQ ID NO: 1400 - protein, 38 aa, Artificial Sequence
  Description of Artificial Sequence: Synthetic polypeptide
HYADSVKGRFTISRDNSKNTLYLQMKSLRAEDTATYYC

SEQ ID NO: 1401 - protein, 38 aa, Artificial Sequence
  Description of Artificial Sequence: Synthetic polypeptide
YYADSVKGRFTISRDNSKNTLYLQMNSLRAEDTGVYYC

SEQ ID NO: 1402 - protein, 38 aa, Artificial Sequence
  Description of Artificial Sequence: Synthetic polypeptide
DYAQNFQGRVTMTTDTSTNTAYMELRSLRSDDTAVYYC

SEQ ID NO: 1403 - protein, 38 aa, Artificial Sequence
  Description of Artificial Sequence: Synthetic polypeptide
SYAQKFQGRVTMTRDTSTSTVYMELSSLRSEDTAVYYC

SEQ ID NO: 1404 - protein, 38 aa, Artificial Sequence
  Description of Artificial Sequence: Synthetic polypeptide
YYADSVKGRFTISRDNSKKMLYLQMNSLTAEDTAVYYC

SEQ ID NO: 1405 - protein, 38 aa, Artificial Sequence
  Description of Artificial Sequence: Synthetic polypeptide
NYAQRFQGRVTITADESTNTAYMELSSLRSEDTAVYYC

SEQ ID NO: 1406 - protein, 38 aa, Artificial Sequence
  Description of Artificial Sequence: Synthetic polypeptide
YYADSVKGRFTISRDNSKNTLYLQMNSLRDEDTAVYYC

SEQ ID NO: 1407 - protein, 38 aa, Artificial Sequence
  Description of Artificial Sequence: Synthetic polypeptide
NYNPSFQSRVAMSRDTPKNQFSLKLSSVTAADTAVYYC

SEQ ID NO: 1408 - protein, 38 aa, Artificial Sequence
  Description of Artificial Sequence: Synthetic polypeptide
RKNPSFEGQVTMSVDKSLHSVYLHWTSLKVSDTAKYYC

SEQ ID NO: 1409 - protein, 38 aa, Artificial Sequence
  Description of Artificial Sequence: Synthetic polypeptide
GYAQSFQGRVTFTRDTSINTAYMELSSLRSEDTAVYYC

SEQ ID NO: 1410 - protein, 38 aa, Artificial Sequence
  Description of Artificial Sequence: Synthetic polypeptide
NYSPSFQGHVTITVDKSTGAAYLHWSSLKASDTGMYYC

SEQ ID NO: 1411 - protein, 38 aa, Artificial Sequence
  Description of Artificial Sequence: Synthetic polypeptide
IYSPSFQGQVTISADKSISTAYLQWSSLKASDTAIYYC

SEQ ID NO: 1412 - protein, 38 aa, Artificial Sequence
  Description of Artificial Sequence: Synthetic polypeptide
YYADSLKGRFNISRDNAKKLLYLQLSSLSAEDTALYFC

SEQ ID NO: 1413 - protein, 38 aa, Artificial Sequence
  Description of Artificial Sequence: Synthetic polypeptide
NYAQKLQGRVTMTTDTSTSTAYMELRSLRSGDTAVYYC

SEQ ID NO: 1414 - protein, 38 aa, Artificial Sequence
  Description of Artificial Sequence: Synthetic polypeptide
YYNPSLKSRVTISVDTSKNQFSLKLSSVTAADTAVYYC

SEQ ID NO: 1415 - protein, 38 aa, Artificial Sequence
  Description of Artificial Sequence: Synthetic polypeptide
DYAESVKGRFTISRDNSKNTLYLQMTSLREEDTAVYYC

SEQ ID NO: 1416 - protein, 11 aa, Artificial Sequence
  Description of Artificial Sequence: Synthetic peptide
WGQGTTATASS

SEQ ID NO: 1417 - protein, 11 aa, Artificial Sequence
  Description of Artificial Sequence: Synthetic peptide
RGRGTPGTASS

SEQ ID NO: 1418 - protein, 11 aa, Artificial Sequence
  Description of Artificial Sequence: Synthetic peptide
WGQGTLGTVSS

SEQ ID NO: 1419 - protein, 25 aa, Artificial Sequence
  Description of Artificial Sequence: Synthetic peptide
NFMLTQPHSVSESPGKTVTMSCTRS

SEQ ID NO: 1420 - protein, 25 aa, Artificial Sequence
  Description of Artificial Sequence: Synthetic peptide
QPVLTQPPSASGSPGQSVTISCTGT

SEQ ID NO: 1421 - protein, 26 aa, Artificial Sequence
  Description of Artificial Sequence: Synthetic peptide
ETTLTQSPATLSLSPGERATLSCRAS

SEQ ID NO: 1422 - protein, 25 aa, Artificial Sequence
  Description of Artificial Sequence: Synthetic peptide
QPVLTQPRSVSGSPGQSVTISCTGT

SEQ ID NO: 1423 - protein, 25 aa, Artificial Sequence
  Description of Artificial Sequence: Synthetic peptide
QSVLTQPLSASGTPGHRVTISCSGS

SEQ ID NO: 1424 - protein, 25 aa, Artificial Sequence
  Description of Artificial Sequence: Synthetic peptide
SYELTQPPSVSQGLRQTATLTCTGN

SEQ ID NO: 1425 - protein, 25 aa, Artificial Sequence
  Description of Artificial Sequence: Synthetic peptide
NFMLTHPHSVSQSPGKTATMSCTRS

SEQ ID NO: 1426 - protein, 25 aa, Artificial Sequence
  Description of Artificial Sequence: Synthetic peptide
HFVLTQPPSASESPGKTVTMSCTGT

SEQ ID NO: 1427 - protein, 26 aa, Artificial Sequence
  Description of Artificial Sequence: Synthetic peptide
ETTLTQSPGTLSLSPGERATLSCRAS

SEQ ID NO: 1428 - protein, 26 aa, Artificial Sequence
  Description of Artificial Sequence: Synthetic peptide
EIVLTQSPATLALSPGERATLSCRDS

SEQ ID NO: 1429 - protein, 25 aa, Artificial Sequence
  Description of Artificial Sequence: Synthetic peptide
QSVLTQPPSASGTPGQRVTISCSGS

SEQ ID NO: 1430 - protein, 25 aa, Artificial Sequence
  Description of Artificial Sequence: Synthetic peptide
SYELTQPPSVSVAPGKTANMTCGGN

SEQ ID NO: 1431 - protein, 25 aa, Artificial Sequence
  Description of Artificial Sequence: Synthetic peptide
QSGLTQPPSVSGAPGQRVTISCTGS

SEQ ID NO: 1432 - protein, 25 aa, Artificial Sequence
  Description of Artificial Sequence: Synthetic peptide
SYELTQPPSVSVSPGQTARITCSGD

SEQ ID NO: 1433 - protein, 25 aa, Artificial Sequence
  Description of Artificial Sequence: Synthetic peptide
HTVLTHPAPAAAYPGQTITISCSAT

SEQ ID NO: 1434 - protein, 26 aa, Artificial Sequence
  Description of Artificial Sequence: Synthetic peptide
DIVMTQTPSTLSASVGDRVTISCRAS

SEQ ID NO: 1435 - protein, 25 aa, Artificial Sequence
  Description of Artificial Sequence: Synthetic peptide
NFMLTQPHSVSGSPGKTVTISCTRD

SEQ ID NO: 1436 - protein, 25 aa, Artificial Sequence
  Description of Artificial Sequence: Synthetic peptide
QPVLTQPPSVSGAPGQSVTISCIGS

SEQ ID NO: 1437 - protein, 25 aa, Artificial Sequence
  Description of Artificial Sequence: Synthetic peptide
QPGLTQPPSVSKDLRQTATLTCTGN

SEQ ID NO: 1438 - protein, 25 aa, Artificial Sequence
  Description of Artificial Sequence: Synthetic peptide
QPVLTQPPSASGTPGQRVTISCSGG

SEQ ID NO: 1439 - protein, 25 aa, Artificial Sequence
  Description of Artificial Sequence: Synthetic peptide
QPVLTQPPSVSVSPGQTASITCSGD

SEQ ID NO: 1440 - protein, 25 aa, Artificial Sequence
  Description of Artificial Sequence: Synthetic peptide
SYELTQPPSVSVSPGQTATITCSGD

SEQ ID NO: 1441 - protein, 25 aa, Artificial Sequence
  Description of Artificial Sequence: Synthetic peptide
QSVLTQPPSASGSPGHSVTISCTGT

SEQ ID NO: 1442 - protein, 25 aa, Artificial Sequence
  Description of Artificial Sequence: Synthetic peptide
NFMLTQPHSVSESPGKTVAISCTRS

SEQ ID NO: 1443 - protein, 25 aa, Artificial Sequence
  Description of Artificial Sequence: Synthetic peptide
LPMLTQPPSMSGTPGQRVTISCSGS

SEQ ID NO: 1444 - protein, 25 aa, Artificial Sequence
  Description of Artificial Sequence: Synthetic peptide
SYELTQPPSVSKGLRQTATLTCTGN

SEQ ID NO: 1445 - protein, 26 aa, Artificial Sequence
  Description of Artificial Sequence: Synthetic peptide
DIVMTQSPATLSVSPGERATLSCRAS

SEQ ID NO: 1446 - protein, 25 aa, Artificial Sequence
  Description of Artificial Sequence: Synthetic peptide
QSVLTQPPSASGSPGQSVTVSCTGT

SEQ ID NO: 1447 - protein, 25 aa, Artificial Sequence
  Description of Artificial Sequence: Synthetic peptide
QPVLTQPPSVSKDLRQTATLTCTGN

SEQ ID NO: 1448 - protein, 25 aa, Artificial Sequence
  Description of Artificial Sequence: Synthetic peptide
QSVLTQPPSVSGAPGQRVTISCTGS

SEQ ID NO: 1449 - protein, 25 aa, Artificial Sequence
  Description of Artificial Sequence: Synthetic peptide
LPVLTQPPSASETPGQRVTISCSGG

SEQ ID NO: 1450 - protein, 25 aa, Artificial Sequence
  Description of Artificial Sequence: Synthetic peptide
QPVLTQPPSVSGAPGQSVTISCTGS

SEQ ID NO: 1451 - protein, 25 aa, Artificial Sequence
  Description of Artificial Sequence: Synthetic peptide
QSVLTQPPSASGTPGGRVTISCSGS

SEQ ID NO: 1452 - protein, 25 aa, Artificial Sequence
  Description of Artificial Sequence: Synthetic peptide
SSELTQDPAVSVALGQTVRIICQGD

SEQ ID NO: 1453 - protein, 25 aa, Artificial Sequence
  Description of Artificial Sequence: Synthetic peptide
SYELTQPPSVSVSPGQTASITCSGD

SEQ ID NO: 1454 - protein, 25 aa, Artificial Sequence
  Description of Artificial Sequence: Synthetic peptide
LPVLTQPPSVSGAPGQRVAISCTGS

SEQ ID NO: 1455 - protein, 25 aa, Artificial Sequence
  Description of Artificial Sequence: Synthetic peptide
QSVLTQPPSVSVAPGQTARITCGGD

SEQ ID NO: 1456 - protein, 26 aa, Artificial Sequence
  Description of Artificial Sequence: Synthetic peptide
DIVMTQSPLSLPVTPGEPASISCRSS

SEQ ID NO: 1457 - protein, 25 aa, Artificial Sequence
  Description of Artificial Sequence: Synthetic peptide
QSVLTQPPSVSGAPGERVTFSCTGT

SEQ ID NO: 1458 - protein, 17 aa, Artificial Sequence
  Description of Artificial Sequence: Synthetic peptide
VSWYQQHPDKAPKLLIY

SEQ ID NO: 1459 - protein, 17 aa, Artificial Sequence
  Description of Artificial Sequence: Synthetic peptide
LAWYQQKPGQAPRLLIY

SEQ ID NO: 1460 - protein, 17 aa, Artificial Sequence
  Description of Artificial Sequence: Synthetic peptide
VSWYQHHPGKAPKLMIY

SEQ ID NO: 1461 - protein, 17 aa, Artificial Sequence
  Description of Artificial Sequence: Synthetic peptide
VSWYQQHPGKAPKPMIY

SEQ ID NO: 1462 - protein, 17 aa, Artificial Sequence
  Description of Artificial Sequence: Synthetic peptide
LAWYQQKPGQAPRLLIN

SEQ ID NO: 1463 - protein, 17 aa, Artificial Sequence
  Description of Artificial Sequence: Synthetic peptide
ASWYQQKPGQAPLLVIY

SEQ ID NO: 1464 - protein, 17 aa, Artificial Sequence
  Description of Artificial Sequence: Synthetic peptide
VNWYQQVPGTAPKLLIY

SEQ ID NO: 1465 - protein, 17 aa, Artificial Sequence
  Description of Artificial Sequence: Synthetic peptide
VQWYQQRPGSAPTAVIF

SEQ ID NO: 1466 - protein, 17 aa, Artificial Sequence
  Description of Artificial Sequence: Synthetic peptide
VQWYQKRPGSAPTTVIY

SEQ ID NO: 1467 - protein, 17 aa, Artificial Sequence
  Description of Artificial Sequence: Synthetic peptide
DDCCHQRPPGAPPTAMN

SEQ ID NO: 1468 - protein, 17 aa, Artificial Sequence
  Description of Artificial Sequence: Synthetic peptide
LAWYQQRPGQAPRLLIN

SEQ ID NO: 1469 - protein, 17 aa, Artificial Sequence
  Description of Artificial Sequence: Synthetic peptide
ANWYQQKPGQAPILVMS

SEQ ID NO: 1470 - protein, 17 aa, Artificial Sequence
  Description of Artificial Sequence: Synthetic peptide
VSWYQQHPGKAPKLMIS

SEQ ID NO: 1471 - protein, 17 aa, Artificial Sequence
  Description of Artificial Sequence: Synthetic peptide
VHWYQQKPGQAPVLVVY

SEQ ID NO: 1472 - protein, 17 aa, Artificial Sequence
  Description of Artificial Sequence: Synthetic peptide
VHWYQQLPGTAPKLIIY

SEQ ID NO: 1473 - protein, 17 aa, Artificial Sequence
  Description of Artificial Sequence: Synthetic peptide
AYWYQQRPGQAPVLVIY

SEQ ID NO: 1474 - protein, 17 aa, Artificial Sequence
  Description of Artificial Sequence: Synthetic peptide
VSWYQQHPGKAPTLVIY

SEQ ID NO: 1475 - protein, 17 aa, Artificial Sequence
  Description of Artificial Sequence: Synthetic peptide
VAWYQQKPGKVPELLMY

SEQ ID NO: 1476 - protein, 17 aa, Artificial Sequence
  Description of Artificial Sequence: Synthetic peptide
VQWYQQRPGSSPTAVIY

SEQ ID NO: 1477 - protein, 17 aa, Artificial Sequence
  Description of Artificial Sequence: Synthetic peptide
VSWYQQPPGTAPKLMIY

SEQ ID NO: 1478 - protein, 17 aa, Artificial Sequence
  Description of Artificial Sequence: Synthetic peptide
VQWYQQVPGTAPKLLIY

SEQ ID NO: 1479 - protein, 17 aa, Artificial Sequence
  Description of Artificial Sequence: Synthetic peptide
ASWYQQKPGQSPVLVIY

SEQ ID NO: 1480 - protein, 17 aa, Artificial Sequence
  Description of Artificial Sequence: Synthetic peptide
AYWYRQRPGQAPVLVIY

SEQ ID NO: 1481 - protein, 17 aa, Artificial Sequence
  Description of Artificial Sequence: Synthetic peptide
VSWYQQHPGKAPKVLIY

SEQ ID NO: 1482 - protein, 17 aa, Artificial Sequence
  Description of Artificial Sequence: Synthetic peptide
VNWYQQVPGTAPKVLIY

SEQ ID NO: 1483 - protein, 17 aa, Artificial Sequence
  Description of Artificial Sequence: Synthetic peptide
ASWLQHHQGHPPKLLSY

SEQ ID NO: 1484 - protein, 17 aa, Artificial Sequence
  Description of Artificial Sequence: Synthetic peptide
VSWYQQKPGHSPLLVIY

SEQ ID NO: 1485 - protein, 17 aa, Artificial Sequence
  Description of Artificial Sequence: Synthetic peptide
LAWYQQRPGQAPRLLIS

SEQ ID NO: 1486 - protein, 17 aa, Artificial Sequence
  Description of Artificial Sequence: Synthetic peptide
VSWYQQHPGKAPKLLIH

SEQ ID NO: 1487 - protein, 17 aa, Artificial Sequence
  Description of Artificial Sequence: Synthetic peptide
TAWLQQHQGHPPKLVSY

SEQ ID NO: 1488 - protein, 17 aa, Artificial Sequence
  Description of Artificial Sequence: Synthetic peptide
VSWYQQHPASAPKLIIY

SEQ ID NO: 1489 - protein, 17 aa, Artificial Sequence
  Description of Artificial Sequence: Synthetic peptide
VYWYQRLPGTAPKLLIY

SEQ ID NO: 1490 - protein, 17 aa, Artificial Sequence
  Description of Artificial Sequence: Synthetic peptide
ANWYQQKSGQAPILVMY

SEQ ID NO: 1491 - protein, 17 aa, Artificial Sequence
  Description of Artificial Sequence: Synthetic peptide
AYWYQQRPGQAPVLLIY

SEQ ID NO: 1492 - protein, 17 aa, Artificial Sequence
  Description of Artificial Sequence: Synthetic peptide
VHWYQQLPGAAPKLLIY

SEQ ID NO: 1493 - protein, 17 aa, Artificial Sequence
  Description of Artificial Sequence: Synthetic peptide
VHWYQQKAGQAPVLVVH

SEQ ID NO: 1494 - protein, 17 aa, Artificial Sequence
  Description of Artificial Sequence: Synthetic peptide
LDWYLQKPGQSPQLLIH

SEQ ID NO: 1495 - protein, 38 aa, Artificial Sequence
  Description of Artificial Sequence: Synthetic polypeptide
QRPSGVSGRFSGSIDSSSNSASLTISGLQPEDEADYYC

SEQ ID NO: 1496 - protein, 36 aa, Artificial Sequence [sequence omitted]

SEQ ID NO: 1497 - protein, 36 aa, Artificial Sequence
  Description of Artificial Sequence: Synthetic polypeptide
ERPSGVSSRFSGSKSGNTASLTISGLQGEDEADYFC

SEQ ID NO: 1498 - protein, 36 aa, Artificial Sequence
  Description of Artificial Sequence: Synthetic polypeptide
SRANGIPDRFSGSGSGTDFTLTITRLEPEDFAVYFC

SEQ ID NO: 1499 - protein, 36 aa, Artificial Sequence
  Description of Artificial Sequence: Synthetic polypeptide
RRPSGVPDRFSGSKSGTSAALAISGLQSEDEADYYC

SEQ ID NO: 1500 - protein, 38 aa, Artificial Sequence
  Description of Artificial Sequence: Synthetic polypeptide
QRPSGVPDRFSGSIDSSSNSASLTISGLRTEDEADYYC

SEQ ID NO: 1501 - protein, 36 aa, Artificial Sequence
  Description of Artificial Sequence: Synthetic polypeptide
IRPSGISERLSASTSGNTASLTITGLQPEDEADYYC

SEQ ID NO: 1502 - protein, 38 aa, Artificial Sequence
  Description of Artificial Sequence: Synthetic polypeptide
QRPAGVSGRFSGSIDSSSNSASLTISAVHPEDEADYYC

SEQ ID NO: 1503 - protein, 38 aa, Artificial Sequence
  Description of Artificial Sequence: Synthetic polypeptide
HKPSAGSADLFAAFDSASTSALIAFSVLHADDDDDYCC

SEQ ID NO: 1504 - protein, 36 aa, Artificial Sequence
  Description of Artificial Sequence: Synthetic polypeptide
NRAPGIPARFSGSGSGTDFTLTISSLEPEDFAVYYC

SEQ ID NO: 1505 - protein, 36 aa, Artificial Sequence
  Description of Artificial Sequence: Synthetic polypeptide
SRANGIPYRFSGSGSGTDFTLTITRLEPEDFAVYFC

SEQ ID NO: 1506 - protein, 36 aa, Artificial Sequence
  Description of Artificial Sequence: Synthetic polypeptide
ERPSGIPERFSGSSSGTRVTLTISGVQAEDEADYYC

SEQ ID NO: 1507 - protein, 36 aa, Artificial Sequence
  Description of Artificial Sequence: Synthetic polypeptide
TRATGIPARFSGSGSGTEFTLTVSRLEPEDFAVYYC

SEQ ID NO: 1508 - protein, 36 aa, Artificial Sequence
  Description of Artificial Sequence: Synthetic polypeptide
QRPSGVPDRFSGSKSGTSVSLAISGLQSEDEADYYC

SEQ ID NO: 1509 - protein, 36 aa, Artificial Sequence
  Description of Artificial Sequence: Synthetic polypeptide
DRPPGIPERFSGSNSGNTATLTISRVEVGDEADYYC

SEQ ID NO: 1510 - protein, 36 aa, Artificial Sequence
  Description of Artificial Sequence: Synthetic polypeptide
NRPSGIPDRISGSSSGNTASLTITGAQAEDEADYYC

SEQ ID NO: 1511 - protein, 36 aa, Artificial Sequence
  Description of Artificial Sequence: Synthetic polypeptide
NRPSGVPDRFSGSKSGTSASLAITGLQAEDEADYYC

SEQ ID NO: 1512 - protein, 36 aa, Artificial Sequence
  Description of Artificial Sequence: Synthetic polypeptide
ERPSGIPERFSGSSSGTTVTLTISGVQAEDEADYYC

SEQ ID NO: 1513 - protein, 35 aa, Artificial Sequence
  Description of Artificial Sequence: Synthetic polypeptide
NRPSGVPDRFSGSIYGNTDSLTVSAGVEDEDDYYC

SEQ ID NO: 1514 - protein, 36 aa, Artificial Sequence
  Description of Artificial Sequence: Synthetic polypeptide
RLEPGVPSRFSGSGSGTEFTLTISNLQPEDFATYYC

SEQ ID NO: 1515 - protein, 38 aa, Artificial Sequence
  Description of Artificial Sequence: Synthetic polypeptide
QRPSEVPDRFSGSIDISSNSASLTISGLKTEDEADYYC

SEQ ID NO: 1516 - protein, 36 aa, Artificial Sequence
  Description of Artificial Sequence: Synthetic polypeptide
TRATGIPARFSGSGSGTDFTLTISRLEPEDFAVYFC

SEQ ID NO: 1517 - protein, 36 aa, Artificial Sequence
  Description of Artificial Sequence: Synthetic polypeptide
NRPSGVPDRFSGSKSGNTASLTISGLQAEDEADYYC

SEQ ID NO: 1518 - protein, 38 aa, Artificial Sequence
  Description of Artificial Sequence: Synthetic polypeptide
RRPSGVPDRFSGSVDRSSNSASLTISGLDTEDEADYYC

SEQ ID NO: 1519 - protein, 36 aa, Artificial Sequence
  Description of Artificial Sequence: Synthetic polypeptide
NRPSGVPDRFSGSKSGTSASLAISGLRSEDEADYFC

SEQ ID NO: 1520 - protein, 36 aa, Artificial Sequence
  Description of Artificial Sequence: Synthetic polypeptide
NRPSGISERFSASTSGNTASLTITGLQPEDEADYYC

SEQ ID NO: 1521 - protein, 36 aa, Artificial Sequence
  Description of Artificial Sequence: Synthetic polypeptide
HRPSGVPDRFSGSKSGNTASLTISGLQAEDEADYYC

SEQ ID NO: 1522 - protein, 36 aa, Artificial Sequence
  Description of Artificial Sequence: Synthetic polypeptide
KRPSGIPERFSGSNSGNTATLTISETQAMDEADYYC

SEQ ID NO: 1523 - protein, 36 aa, Artificial Sequence
  Description of Artificial Sequence: Synthetic polypeptide
KRPSGVPDRFSGSKSGNTASLSVSGLQAEDEADYYC

SEQ ID NO: 1524 - protein, 36 aa, Artificial Sequence
  Description of Artificial Sequence: Synthetic polypeptide
QRPSGVPDRFSGSKSGTSASLAISGLRSEDEADYSC

SEQ ID NO: 1525 - protein, 36 aa, Artificial Sequence
  Description of Artificial Sequence: Synthetic polypeptide
NRPSGISERFSASRSGNTASLTITGLQPEDEADYYC

SEQ ID NO: 1526 - protein, 36 aa, Artificial Sequence
  Description of Artificial Sequence: Synthetic polypeptide
KRPSGIPERFSGSNSGNRAILTINGTQALDEADYYC

SEQ ID NO: 1527 - protein, 36 aa, Artificial Sequence
  Description of Artificial Sequence: Synthetic polypeptide
NRATGIPDRFSGSGSGTDFTLTISSLQPEDFATYYC

SEQ ID NO: 1528 - protein, 36 aa, Artificial Sequence
  Description of Artificial Sequence: Synthetic polypeptide
TRATDIPDRFTGSGSGTDFTLTISSLEPEDFAVYYC

SEQ ID NO: 1529 - protein, 36 aa, Artificial Sequence
  Description of Artificial Sequence: Synthetic polypeptide
KRPSGVPDRFSASKSGNTASLTISGLQPEDEGDYFC

SEQ ID NO: 1530 - protein, 36 aa, Artificial Sequence
  Description of Artificial Sequence: Synthetic polypeptide
NRPSGVSERFSASRSGNTASLTITGLQAEDEADYYC

SEQ ID NO: 1531 - protein, 38 aa, Artificial Sequence
  Description of Artificial Sequence: Synthetic polypeptide
QRPSGVPDRFSGSIDSSSKTASLIISGLETEDEADYYC

SEQ ID NO: 1532 - protein, 36 aa, Artificial Sequence
  Description of Artificial Sequence: Synthetic polypeptide
NRPSGVSNRFSGSESGDTASLTISGLRAEDEADYFC

SEQ ID NO: 1533 - protein, 36 aa, Artificial Sequence
  Description of Artificial Sequence: Synthetic polypeptide
QRPSGVPDRFFGSKSGTSASLAISGLQSEDEADYYC

SEQ ID NO: 1534 - protein, 36 aa, Artificial Sequence
  Description of Artificial Sequence: Synthetic polypeptide
QRPSGVPDRFSGSKSGTSASLAISGLQSEDEADYFC

SEQ ID NO: 1535 - protein, 34 aa, Artificial Sequence
  Description of Artificial Sequence: Synthetic polypeptide
IRPSIPDRFSGSSSGNTASLTITGAQEDEADYYC

SEQ ID NO: 1536 - protein, 36 aa, Artificial Sequence
  Description of Artificial Sequence: Synthetic polypeptide
YRPSGISHRFSGSKSGNTASLTISGLQAEDEADYYC

SEQ ID NO: 1537 - protein, 36 aa, Artificial Sequence
  Description of Artificial Sequence: Synthetic polypeptide
ERSSGIPERFSGSGSGTTVTLTINGVQAEDEADYYC

SEQ ID NO: 1538 - protein, 36 aa, Artificial Sequence
  Description of Artificial Sequence: Synthetic polypeptide
NRPSGVPDRFSGSKSGTSASLAISGLRSEDEADYYC

SEQ ID NO: 1539 - protein, 36 aa, Artificial Sequence
  Description of Artificial Sequence: Synthetic polypeptide
NRASGVPDRFSGSGSDTDFTLKISRVEAEDVGVYYC

SEQ ID NO: 1540 - protein, 36 aa, Artificial Sequence
  Description of Artificial Sequence: Synthetic polypeptide
IRPSGVPDRFSASKSGTSASLAITGLQSEDEGDYYC

SEQ ID NO: 1541 - protein, 38 aa, Artificial Sequence
  Description of Artificial Sequence: Synthetic polypeptide
QRPSGVPDRFSASIDSSSNSASLTISGLKAEDEADYYC

SEQ ID NO: 1542 - protein, 10 aa, Artificial Sequence
  Description of Artificial Sequence: Synthetic peptide
FGTGTRVAVL

SEQ ID NO: 1543 - protein, 10 aa, Artificial Sequence
  Description of Artificial Sequence: Synthetic peptide
FGGGTKLEIK

SEQ ID NO: 1544 - protein, 10 aa, Artificial Sequence
  Description of Artificial Sequence: Synthetic peptide
FGGGTNLAVL

SEQ ID NO: 1545 - protein, 10 aa, Artificial Sequence
  Description of Artificial Sequence: Synthetic peptide
FGEGTKLTVL

SEQ ID NO: 1546 - protein, 10 aa, Artificial Sequence
  Description of Artificial Sequence: Synthetic peptide
FGGGTNLTVL

SEQ ID NO: 1547 - protein, 10 aa, Artificial Sequence
  Description of Artificial Sequence: Synthetic peptide
FGAGTKVTVL

SEQ ID NO: 1548 - protein, 10 aa, Artificial Sequence
  Description of Artificial Sequence: Synthetic peptide
FGPGTKVHIK

SEQ ID NO: 1549 - protein, 10 aa, Artificial Sequence
  Description of Artificial Sequence: Synthetic peptide
SAERTKMEIK

SEQ ID NO: 1550 - protein, 10 aa, Artificial Sequence
  Description of Artificial Sequence: Synthetic peptide
FGTGTKVAVL

SEQ ID NO: 1551 - protein, 10 aa, Artificial Sequence
  Description of Artificial Sequence: Synthetic peptide
FGQGTRVEIR

SEQ ID NO: 1552 - protein, 10 aa, Artificial Sequence
  Description of Artificial Sequence: Synthetic peptide
SQTGTEVAFI

SEQ ID NO: 1553 - protein, 10 aa, Artificial Sequence
  Description of Artificial Sequence: Synthetic peptide
FGQGTKVDIK

SEQ ID NO: 1554 - protein, 10 aa, Artificial Sequence
  Description of Artificial Sequence: Synthetic peptide
FGQGTKLEIK

SEQ ID NO: 1555 - protein, 10 aa, Artificial Sequence
  Description of Artificial Sequence: Synthetic peptide
FGTGTKVNVL

SEQ ID NO: 1556 - protein, 10 aa, Artificial Sequence
  Description of Artificial Sequence: Synthetic peptide
FGGGSRLTVL

SEQ ID NO: 1557 - protein, 10 aa, Artificial Sequence
  Description of Artificial Sequence: Synthetic peptide
FGTGTEVTVL

SEQ ID NO: 1558 - protein, 10 aa, Artificial Sequence
  Description of Artificial Sequence: Synthetic peptide
IGGGTKLTVL

SEQ ID NO: 1559 - protein, 10 aa, Artificial Sequence
  Description of Artificial Sequence: Synthetic peptide
FGQGTKLEIN

SEQ ID NO: 1560 - protein, 10 aa, Artificial Sequence
  Description of Artificial Sequence: Synthetic peptide
FGQGTKVESK

SEQ ID NO: 1561 - protein, 10 aa, Artificial Sequence
  Description of Artificial Sequence: Synthetic peptide
FGGGTKLTVP

SEQ ID NO: 1562 - protein, 10 aa, Artificial Sequence
  Description of Artificial Sequence: Synthetic peptide
VRRRIKLTVL

SEQ ID NO: 1563 - protein, 10 aa, Artificial Sequence
  Description of Artificial Sequence: Synthetic peptide
FGQGTRLDIK

SEQ ID NO: 1564 - protein, 8 aa, Artificial Sequence
  Description of Artificial Sequence: Synthetic peptide
GGSIRTHS

SEQ ID NO: 1565 - protein, 8 aa, Artificial Sequence
  Description of Artificial Sequence: Synthetic peptide
GGSISSYY

SEQ ID NO: 1566 - protein, 8 aa, Artificial Sequence
  Description of Artificial Sequence: Synthetic peptide
GGSIRTHS

SEQ ID NO: 1567 - protein, 10 aa, Artificial Sequence
  Description of Artificial Sequence: Synthetic peptide
GDSVSSYSDA

SEQ ID NO: 1568 - protein, 8 aa, Artificial Sequence
  Description of Artificial Sequence: Synthetic peptide
GFTFSHYD

SEQ ID NO: 1569 - protein, 8 aa, Artificial Sequence
  Description of Artificial Sequence: Synthetic peptide
GFTFSDFP

SEQ ID NO: 1570 - protein, 10 aa, Artificial Sequence
  Description of Artificial Sequence: Synthetic peptide
GFSLSTTGVG

SEQ ID NO: 1571 - protein, 8 aa, Artificial Sequence
  Description of Artificial Sequence: Synthetic peptide
GFTFTTYG

SEQ ID NO: 1572 - protein, 8 aa, Artificial Sequence
  Description of Artificial Sequence: Synthetic peptide
GFTFSSHA

SEQ ID NO: 1573 - protein, 8 aa, Artificial Sequence
  Description of Artificial Sequence: Synthetic peptide
GYTFSDYY

SEQ ID NO: 1574 - protein, 8 aa, Artificial Sequence
  Description of Artificial Sequence: Synthetic peptide
GFTFSSYA

SEQ ID NO: 1575 - protein, 8 aa, Artificial Sequence
  Description of Artificial Sequence: Synthetic peptide
GYSFTGSH

SEQ ID NO: 1576 - protein, 10 aa, Artificial Sequence
  Description of Artificial Sequence: Synthetic peptide
GVSLDTIGMR

SEQ ID NO: 1577 - protein, 8 aa, Artificial Sequence
  Description of Artificial Sequence: Synthetic peptide
GFTFSDYP

SEQ ID NO: 1578 - protein, 8 aa, Artificial Sequence
  Description of Artificial Sequence: Synthetic peptide
GYSFTSYW

SEQ ID NO: 1579 - protein, 10 aa, Artificial Sequence
  Description of Artificial Sequence: Synthetic peptide
GDSVSSRSSA

SEQ ID NO: 1580 - protein, 8 aa, Artificial Sequence
  Description of Artificial Sequence: Synthetic peptide
GYTFTTSG

SEQ ID NO: 1581 - protein, 8 aa, Artificial Sequence
  Description of Artificial Sequence: Synthetic peptide
GGTFSSYA

SEQ ID NO: 1582 - protein, 8 aa, Artificial Sequence
  Description of Artificial Sequence: Synthetic peptide
GGTFSSYT

SEQ ID NO: 1583 - protein, 8 aa, Artificial Sequence
  Description of Artificial Sequence: Synthetic peptide
GFTFSSYW

SEQ ID NO: 1584 - protein, 8 aa, Artificial Sequence
  Description of Artificial Sequence: Synthetic peptide
GFTFDDYA

SEQ ID NO: 1585 - protein, 8 aa, Artificial Sequence
  Description of Artificial Sequence: Synthetic peptide
GFTFDDYA

SEQ ID NO: 1586 - protein, 8 aa, Artificial Sequence
  Description of Artificial Sequence: Synthetic peptide
GYSFTSNW

SEQ ID NO: 1587 - protein, 8 aa, Artificial Sequence
  Description of Artificial Sequence: Synthetic peptide
GYTFTSYG

SEQ ID NO: 1588 - protein, 8 aa, Artificial Sequence
  Description of Artificial Sequence: Synthetic peptide
GGTFSSYA

SEQ ID NO: 1589 - protein, 8 aa, Artificial Sequence
  Description of Artificial Sequence: Synthetic peptide
GYTFTSYG

SEQ ID NO: 1590 - protein, 10 aa, Artificial Sequence
  Description of Artificial Sequence: Synthetic peptide
GFSLTTTGVS

SEQ ID NO: 1591 - protein, 10 aa, Artificial Sequence
  Description of Artificial Sequence: Synthetic peptide
GFSLSTSAMC

SEQ ID NO: 1592 - protein, 8 aa, Artificial Sequence
  Description of Artificial Sequence: Synthetic peptide
GFTFSDYY

SEQ ID NO: 1593 - protein, 8 aa, Artificial Sequence
  Description of Artificial Sequence: Synthetic peptide
GFAFSDFP

SEQ ID NO: 1594 - protein, 8 aa, Artificial Sequence
  Description of Artificial Sequence: Synthetic peptide
GFTFSSYA

SEQ ID NO: 1595 - protein, 8 aa, Artificial Sequence
  Description of Artificial Sequence: Synthetic peptide
GFPFNAYY

SEQ ID NO: 1596 - protein, 8 aa, Artificial Sequence
  Description of Artificial Sequence: Synthetic peptide
GFTFDDYA

SEQ ID NO: 1597 - protein, 8 aa, Artificial Sequence
  Description of Artificial Sequence: Synthetic peptide
GFTFDDYA

SEQ ID NO: 1598 - protein, 9 aa, Artificial Sequence
  Description of Artificial Sequence: Synthetic peptide
GGSISSSNW

SEQ ID NO: 1599 - protein, 8 aa, Artificial Sequence
  Description of Artificial Sequence: Synthetic peptide
GASISNSF

SEQ ID NO: 1600 - protein, 8 aa, Artificial Sequence
  Description of Artificial Sequence: Synthetic peptide
GGSFTTHS

SEQ ID NO: 1601 - protein, 8 aa, Artificial Sequence
  Description of Artificial Sequence: Synthetic peptide
GGSFRTHS

SEQ ID NO: 1602 - protein, 8 aa, Artificial Sequence
  Description of Artificial Sequence: Synthetic peptide
GGSIRTHS

SEQ ID NO: 1603 - protein, 8 aa, Artificial Sequence
  Description of Artificial Sequence: Synthetic peptide
GGSIRTHS

SEQ ID NO: 1604 - protein, 8 aa, Artificial Sequence
  Description of Artificial Sequence: Synthetic peptide
GYSFTSYW

SEQ ID NO: 1605 - protein, 8 aa, Artificial Sequence
  Description of Artificial Sequence: Synthetic peptide
RYSFSNYW

SEQ ID NO: 1606 - protein, 8 aa, Artificial Sequence
  Description of Artificial Sequence: Synthetic peptide
GYSFTSYW

SEQ ID NO: 1607 - protein, 8 aa, Artificial Sequence
  Description of Artificial Sequence: Synthetic peptide
GYSFTSYW

SEQ ID NO: 1608 - protein, 10 aa, Artificial Sequence
  Description of Artificial Sequence: Synthetic peptide
GDSVTSNSAA

SEQ ID NO: 1609 - protein, 8 aa, Artificial Sequence
  Description of Artificial Sequence: Synthetic peptide
GYGFITYW

SEQ ID NO: 1610 - protein, 7 aa, Artificial Sequence
  Description of Artificial Sequence: Synthetic peptide
IHHSGAT

SEQ ID NO: 1611 - protein, 7 aa, Artificial Sequence
  Description of Artificial Sequence: Synthetic peptide
IYTSGST

SEQ ID NO: 1612 - protein, 7 aa, Artificial Sequence
  Description of Artificial Sequence: Synthetic peptide
IHHSGAT

SEQ ID NO: 1613 - protein, 9 aa, Artificial Sequence
  Description of Artificial Sequence: Synthetic peptide
TYYRSKWYN

SEQ ID NO: 1614 - protein, 8 aa, Artificial Sequence
  Description of Artificial Sequence: Synthetic peptide
IGYDGTNL

SEQ ID NO: 1615 - protein, 8 aa, Artificial Sequence
  Description of Artificial Sequence: Synthetic peptide
ISYDGNIK

SEQ ID NO: 1616 - protein, 7 aa, Artificial Sequence
  Description of Artificial Sequence: Synthetic peptide
IYWNDDK

SEQ ID NO: 1617 - protein, 8 aa, Artificial Sequence
  Description of Artificial Sequence: Synthetic peptide
ISYDGSIK

SEQ ID NO: 1618 - protein, 8 aa, Artificial Sequence
  Description of Artificial Sequence: Synthetic peptide
ISYDGSYT

SEQ ID NO: 1619 - protein, 8 aa, Artificial Sequence
  Description of Artificial Sequence: Synthetic peptide
IDPNSGGT

SEQ ID NO: 1620 - protein, 8 aa, Artificial Sequence
  Description of Artificial Sequence: Synthetic peptide
ISYGGSNK

SEQ ID NO: 1621 - protein, 8 aa, Artificial Sequence
  Description of Artificial Sequence: Synthetic peptide
INPDSGVI

SEQ ID NO: 1622 - protein, 7 aa, Artificial Sequence
  Description of Artificial Sequence: Synthetic peptide
IDWDDDK

SEQ ID NO: 1623 - protein, 8 aa, Artificial Sequence
  Description of Artificial Sequence: Synthetic peptide
TSYDGRIK

SEQ ID NO: 1624 - protein, 8 aa, Artificial Sequence
  Description of Artificial Sequence: Synthetic peptide
IYPGDSDT

SEQ ID NO: 1625 - protein, 9 aa, Artificial Sequence
  Description of Artificial Sequence: Synthetic peptide
TYYRSNWNY

SEQ ID NO: 1626 - protein, 8 aa, Artificial Sequence
  Description of Artificial Sequence: Synthetic peptide
ISAYNGNT

SEQ ID NO: 1627 - protein, 8 aa, Artificial Sequence
  Description of Artificial Sequence: Synthetic peptide
INPNSGGT

SEQ ID NO: 1628 - protein, 8 aa, Artificial Sequence
  Description of Artificial Sequence: Synthetic peptide
IIPILGTP

SEQ ID NO: 1629 - protein, 8 aa, Artificial Sequence
  Description of Artificial Sequence: Synthetic peptide
IKQDGSEK

SEQ ID NO: 1630 - protein, 8 aa, Artificial Sequence
  Description of Artificial Sequence: Synthetic peptide
IDWNSGVI

SEQ ID NO: 1631 - protein, 8 aa, Artificial Sequence
  Description of Artificial Sequence: Synthetic peptide
IDWNSGVI

SEQ ID NO: 1632 - protein, 8 aa, Artificial Sequence
  Description of Artificial Sequence: Synthetic peptide
IFPGDSDT

SEQ ID NO: 1633 - protein, 8 aa, Artificial Sequence
  Description of Artificial Sequence: Synthetic peptide
ISAYNGNT

SEQ ID NO: 1634 - protein, 8 aa, Artificial Sequence
  Description of Artificial Sequence: Synthetic peptide
ISGYNGNT

SEQ ID NO: 1635 - protein, 8 aa, Artificial Sequence
  Description of Artificial Sequence: Synthetic peptide
ISTYNGNT

SEQ ID NO: 1636 - protein, 7 aa, Artificial Sequence
  Description of Artificial Sequence: Synthetic peptide
IHWDDDK

SEQ ID NO: 1637 - protein, 7 aa, Artificial Sequence
  Description of Artificial Sequence: Synthetic peptide
IDWDNDR

SEQ ID NO: 1638 - protein, 8 aa, Artificial Sequence
  Description of Artificial Sequence: Synthetic peptide
ISSSSSDT

SEQ ID NO: 1639 - protein, 8 aa, Artificial Sequence
  Description of Artificial Sequence: Synthetic peptide
ISYDGSLK

SEQ ID NO: 1640 - protein, 8 aa, Artificial Sequence
  Description of Artificial Sequence: Synthetic peptide
ISSNGGST

SEQ ID NO: 1641 - protein, 8 aa, Artificial Sequence
  Description of Artificial Sequence: Synthetic peptide
INQDGSEK

SEQ ID NO: 1642 - protein, 8 aa, Artificial Sequence
  Description of Artificial Sequence: Synthetic peptide
IDWNSGVI

SEQ ID NO: 1643 - protein, 8 aa, Artificial Sequence
  Description of Artificial Sequence: Synthetic peptide
ISWNSGSI

SEQ ID NO: 1644 - protein, 7 aa, Artificial Sequence
  Description of Artificial Sequence: Synthetic peptide
IYHSGST

SEQ ID NO: 1645 - protein, 7 aa, Artificial Sequence
  Description of Artificial Sequence: Synthetic peptide
TSYSGNS

SEQ ID NO: 1646 - protein, 7 aa, Artificial Sequence
  Description of Artificial Sequence: Synthetic peptide
ILPGGAT

SEQ ID NO: 1647 - protein, 7 aa, Artificial Sequence
  Description of Artificial Sequence: Synthetic peptide
IHHSGAT

SEQ ID NO: 1648 - protein, 7 aa, Artificial Sequence
  Description of Artificial Sequence: Synthetic peptide
IHHSGAT

SEQ ID NO: 1649 - protein, 7 aa, Artificial Sequence
  Description of Artificial Sequence: Synthetic peptide
IHHSGAT

SEQ ID NO: 1650 - protein, 8 aa, Artificial Sequence
  Description of Artificial Sequence: Synthetic peptide
IYPGDSDT

SEQ ID NO: 1651 - protein, 8 aa, Artificial Sequence
  Description of Artificial Sequence: Synthetic peptide
IYPYDSDT

SEQ ID NO: 1652 - protein, 8 aa, Artificial Sequence
  Description of Artificial Sequence: Synthetic peptide
IYPGDSDT

SEQ ID NO: 1653 - protein, 8 aa, Artificial Sequence
  Description of Artificial Sequence: Synthetic peptide
IYPGDSDT

SEQ ID NO: 1654 - protein, 9 aa, Artificial Sequence
  Description of Artificial Sequence: Synthetic peptide
TYYSSKWYN

SEQ ID NO: 1655 - protein, 8 aa, Artificial Sequence
  Description of Artificial Sequence: Synthetic peptide
IYPGDSET

SEQ ID NO: 1656 - protein, 9 aa, Artificial Sequence
  Description of Artificial Sequence: Synthetic peptide
ARGPGILSY

SEQ ID NO: 1657 - protein, 11 aa, Artificial Sequence
  Description of Artificial Sequence: Synthetic peptide
ARDVGFGWFDR

SEQ ID NO: 1658 - protein, 9 aa, Artificial Sequence
  Description of Artificial Sequence: Synthetic peptide
ARGPGILSY

SEQ ID NO: 1659 - protein, 19 aa, Artificial Sequence
  Description of Artificial Sequence: Synthetic peptide
AREIVATTPFRNYYYGMDV

SEQ ID NO: 1660 - protein, 20 aa, Artificial Sequence
  Description of Artificial Sequence: Synthetic peptide
ARAANYYDSSGYGRADAFDI

SEQ ID NO: 1661 - protein, 9 aa, Artificial Sequence
  Description of Artificial Sequence: Synthetic peptide
ARGGSSFDI

SEQ ID NO: 1662 - protein, 14 aa, Artificial Sequence
  Description of Artificial Sequence: Synthetic peptide
ARISGSGYFYPFDI

SEQ ID NO: 1663 - protein, 14 aa, Artificial Sequence
  Description of Artificial Sequence: Synthetic peptide
ARVGDSSSYYGIDA

SEQ ID NO: 1664 - protein, 11 aa, Artificial Sequence
  Description of Artificial Sequence: Synthetic peptide
ARDWVNFGMDV

SEQ ID NO: 1665 - protein, 15 aa, Artificial Sequence
  Description of Artificial Sequence: Synthetic peptide
ARDRGRGGQAGAFDY

SEQ ID NO: 1666 - protein, 16 aa, Artificial Sequence
  Description of Artificial Sequence: Synthetic peptide
AKVRGSGWYWGSAFDI

SEQ ID NO: 1667 - protein, 14 aa, Artificial Sequence
  Description of Artificial Sequence: Synthetic peptide
ARDKAIGYVWALDY

SEQ ID NO: 1668 - protein, 11 aa, Artificial Sequence
  Description of Artificial Sequence: Synthetic peptide
ARSGLLYDLDV

SEQ ID NO: 1669 - protein, 14 aa, Artificial Sequence
  Description of Artificial Sequence: Synthetic peptide
ARDPGWLRSVGMDV

SEQ ID NO: 1670 - protein, 9 aa, Artificial Sequence
  Description of Artificial Sequence: Synthetic peptide
ARGWQWHDY

SEQ ID NO: 1671 - protein, 10 aa, Artificial Sequence
  Description of Artificial Sequence: Synthetic peptide
VRNMRPDFDL

SEQ ID NO: 1672 - protein, 12 aa, Artificial Sequence
  Description of Artificial Sequence: Synthetic peptide
ARDFHLYYGMDV

SEQ ID NO: 1673 - protein, 10 aa, Artificial Sequence
  Description of Artificial Sequence: Synthetic peptide
ARGSGGYYLG

SEQ ID NO: 1674 - protein, 12 aa, Artificial Sequence
  Description of Artificial Sequence: Synthetic peptide
AVGSGWYSGFDY

SEQ ID NO: 1675 - protein, 12 aa, Artificial Sequence
  Description of Artificial Sequence: Synthetic peptide
ARGFYYYGAFDI

SEQ ID NO: 1676 - protein, 15 aa, Artificial Sequence
  Description of Artificial Sequence: Synthetic peptide
AKDAYSYGFLGAFDI

SEQ ID NO: 1677 - protein, 33 aa, Artificial Sequence; identical to SEQ ID NO: 157
  Description of Artificial Sequence: Synthetic polypeptide

SEQ ID NO: 1678 - protein, 10 aa, Artificial Sequence
  Description of Artificial Sequence: Synthetic peptide
ARESYNAYGS

SEQ ID NO: 1679 - protein, 11 aa, Artificial Sequence
  Description of Artificial Sequence: Synthetic peptide
ARGFPQLGSDY

SEQ ID NO: 1680 - protein, 20 aa, Artificial Sequence
  Description of Artificial Sequence: Synthetic peptide
ARQMKDSGNYWEYYYYGMDV

SEQ ID NO: 1681 - protein, 10 aa, Artificial Sequence
  Description of Artificial Sequence: Synthetic peptide
ARDVFGHFDY

SEQ ID NO: 1682 - protein, 14 aa, Artificial Sequence
  Description of Artificial Sequence: Synthetic peptide
ASFIMTVYAEYFED

SEQ ID NO: 1683 - protein, 21 aa, Artificial Sequence
  Description of Artificial Sequence: Synthetic peptide
AHSPYDSIWGSFRPSVYYFDY

SEQ ID NO: 1684 - protein, 9 aa, Artificial Sequence
  Description of Artificial Sequence: Synthetic peptide
AMPTREPAY

SEQ ID NO: 1685 - protein, 13 aa, Artificial Sequence
  Description of Artificial Sequence: Synthetic peptide
AREGVSNSRPFDH

SEQ ID NO: 1686 - protein, 14 aa, Artificial Sequence
  Description of Artificial Sequence: Synthetic peptide
TRDLWSGSADSFDI

SEQ ID NO: 1687 - protein, 10 aa, Artificial Sequence
  Description of Artificial Sequence: Synthetic peptide
ARLYWWGMDV

SEQ ID NO: 1688 - protein, 15 aa, Artificial Sequence
  Description of Artificial Sequence: Synthetic peptide
AKDAYSYGFLGAFDI

SEQ ID NO: 1689 - protein, 10 aa, Artificial Sequence
  Description of Artificial Sequence: Synthetic peptide
ARDWWGSIDH

SEQ ID NO: 1690 - protein, 14 aa, Artificial Sequence
  Description of Artificial Sequence: Synthetic peptide
ARRGGTYHRGAFDI

SEQ ID NO: 1691 - protein, 12 aa, Artificial Sequence
  Description of Artificial Sequence: Synthetic peptide
ARREWIKGHFDY

SEQ ID NO: 1692 - protein, 9 aa, Artificial Sequence
  Description of Artificial Sequence: Synthetic peptide
ARGPGILSY

SEQ ID NO: 1693 - protein, 9 aa, Artificial Sequence
  Description of Artificial Sequence: Synthetic peptide
ARGPGILSY

SEQ ID NO: 1694 - protein, 9 aa, Artificial Sequence
  Description of Artificial Sequence: Synthetic peptide
ARGPGILSY

SEQ ID NO: 1695 - protein, 9 aa, Artificial Sequence
  Description of Artificial Sequence: Synthetic peptide
GRGPGILSY

SEQ ID NO: 1696 - protein, 11 aa, Artificial Sequence
  Description of Artificial Sequence: Synthetic peptide
ARQGDGGGYDY

SEQ ID NO: 1697 - protein, 11 aa, Artificial Sequence
  Description of Artificial Sequence: Synthetic peptide
ARQGSSQSFDI

SEQ ID NO: 1698 - protein, 12 aa, Artificial Sequence
  Description of Artificial Sequence: Synthetic peptide
ARRRGSAAAFDT

SEQ ID NO: 1699 - protein, 12 aa, Artificial Sequence
  Description of Artificial Sequence: Synthetic peptide
ARTTYSYGSFDY

SEQ ID NO: 1700 - protein, 11 aa, Artificial Sequence
  Description of Artificial Sequence: Synthetic peptide
ARGWLRLSFDP

SEQ ID NO: 1701 - protein, 12 aa, Artificial Sequence
  Description of Artificial Sequence: Synthetic peptide
AGGSGISTPMDV

SEQ ID NO: 1702 - protein, 115 aa, Artificial Sequence; identical to SEQ ID NO: 1
  Description of Artificial Sequence: Synthetic polypeptide

SEQ ID NO: 1703 - protein, 117 aa, Artificial Sequence; identical to SEQ ID NO: 3
  Description of Artificial Sequence: Synthetic polypeptide

SEQ ID NO: 1704 - protein, 115 aa, Artificial Sequence; identical to SEQ ID NO: 5
  Description of Artificial Sequence: Synthetic polypeptide

SEQ ID NO: 1705 - protein, 129 aa, Artificial Sequence; identical to SEQ ID NO: 7
  Description of Artificial Sequence: Synthetic polypeptide

SEQ ID NO: 1706 - protein, 127 aa, Artificial Sequence; identical to SEQ ID NO: 9
  Description of Artificial Sequence: Synthetic polypeptide

SEQ ID NO: 1707 - protein, 116 aa, Artificial Sequence; identical to SEQ ID NO: 11
  Description of Artificial Sequence: Synthetic polypeptide

SEQ ID NO: 1708 - protein, 122 aa, Artificial Sequence; identical to SEQ ID NO: 13
  Description of Artificial Sequence: Synthetic polypeptide

SEQ ID NO: 1709 - protein, 121 aa, Artificial Sequence; identical to SEQ ID NO: 15
  Description of Artificial Sequence: Synthetic polypeptide

SEQ ID NO: 1710 - protein, 118 aa, Artificial Sequence; identical to SEQ ID NO: 17
  Description of Artificial Sequence: Synthetic polypeptide

SEQ ID NO: 1711 - protein, 122 aa, Artificial Sequence; identical to SEQ ID NO: 19
  Description of Artificial Sequence: Synthetic polypeptide

SEQ ID NO: 1712 - protein, 123 aa, Artificial Sequence; identical to SEQ ID NO: 21
  Description of Artificial Sequence: Synthetic polypeptide

SEQ ID NO: 1713 - protein, 121 aa, Artificial Sequence; identical to SEQ ID NO: 23
  Description of Artificial Sequence: Synthetic polypeptide

SEQ ID NO: 1714 - protein, 119 aa, Artificial Sequence; identical to SEQ ID NO: 25
  Description of Artificial Sequence: Synthetic polypeptide

SEQ ID NO: 1715 - protein, 121 aa, Artificial Sequence; identical to SEQ ID NO: 27
  Description of Artificial Sequence: Synthetic polypeptide

SEQ ID NO: 1716 - protein, 116 aa, Artificial Sequence; identical to SEQ ID NO: 29
  Description of Artificial Sequence: Synthetic polypeptide

SEQ ID NO: 1717 - protein, 120 aa, Artificial Sequence; identical to SEQ ID NO: 31
  Description of Artificial Sequence: Synthetic polypeptide

SEQ ID NO: 1718 - protein, 119 aa, Artificial Sequence; identical to SEQ ID NO: 33
  Description of Artificial Sequence: Synthetic polypeptide

SEQ ID NO: 1719 - protein, 117 aa, Artificial Sequence; identical to SEQ ID NO: 35
  Description of Artificial Sequence: Synthetic polypeptide

SEQ ID NO: 1720 - protein, 119 aa, Artificial Sequence; identical to SEQ ID NO: 37
  Description of Artificial Sequence: Synthetic polypeptide

SEQ ID NO: 1721 - protein, 119 aa, Artificial Sequence; identical to SEQ ID NO: 39
  Description of Artificial Sequence: Synthetic polypeptide

SEQ ID NO: 1722 - protein, 122 aa, Artificial Sequence; identical to SEQ ID NO: 41
  Description of Artificial Sequence: Synthetic polypeptide

SEQ ID NO: 1723 - protein, 140 aa, Artificial Sequence; identical to SEQ ID NO: 43
  Description of Artificial Sequence: Synthetic polypeptide

SEQ ID NO: 1724 - protein, 117 aa, Artificial Sequence; identical to SEQ ID NO: 47
  Description of Artificial Sequence: Synthetic polypeptide

SEQ ID NO: 1725 - protein, 118 aa, Artificial Sequence; identical to SEQ ID NO: 49
  Description of Artificial Sequence: Synthetic polypeptide

SEQ ID NO: 1726 - protein, 127 aa, Artificial Sequence; identical to SEQ ID NO: 51
  Description of Artificial Sequence: Synthetic polypeptide

SEQ ID NO: 1727 - protein, 117 aa, Artificial Sequence; identical to SEQ ID NO: 53
  Description of Artificial Sequence: Synthetic polypeptide

SEQ ID NO: 1728 - protein, 122 aa, Artificial Sequence; identical to SEQ ID NO: 55
  Description of Artificial Sequence: Synthetic polypeptide

SEQ ID NO: 1729 - protein, 129 aa, Artificial Sequence; identical to SEQ ID NO: 57
  Description of Artificial Sequence: Synthetic polypeptide

SEQ ID NO: 1730 - protein, 116 aa, Artificial Sequence; identical to SEQ ID NO: 59
  Description of Artificial Sequence: Synthetic polypeptide

SEQ ID NO: 1731 - protein, 120 aa, Artificial Sequence; identical to SEQ ID NO: 61
  Description of Artificial Sequence: Synthetic polypeptide

SEQ ID NO: 1732 - protein, 121 aa, Artificial Sequence; identical to SEQ ID NO: 63
  Description of Artificial Sequence: Synthetic polypeptide

SEQ ID NO: 1733 - protein, 117 aa, Artificial Sequence; identical to SEQ ID NO: 65
  Description of Artificial Sequence: Synthetic polypeptide

SEQ ID NO: 1734 - protein, 122 aa, Artificial Sequence; identical to SEQ ID NO: 41
  Description of Artificial Sequence: Synthetic polypeptide

SEQ ID NO: 1735 - protein, 117 aa, Artificial Sequence; identical to SEQ ID NO: 69
  Description of Artificial Sequence: Synthetic polypeptide

SEQ ID NO: 1736 - protein, 121 aa, Artificial Sequence; identical to SEQ ID NO: 71
  Description of Artificial Sequence: Synthetic polypeptide

SEQ ID NO: 1737 - protein, 118 aa, Artificial Sequence; identical to SEQ ID NO: 73
  Description of Artificial Sequence: Synthetic polypeptide

SEQ ID NO: 1738 - protein, 115 aa, Artificial Sequence; identical to SEQ ID NO: 75
  Description of Artificial Sequence: Synthetic polypeptide

SEQ ID NO: 1739 - protein, 115 aa, Artificial Sequence; identical to SEQ ID NO: 77
  Description of Artificial Sequence: Synthetic polypeptide

SEQ ID NO: 1740 - protein, 115 aa, Artificial Sequence; identical to SEQ ID NO: 79
  Description of Artificial Sequence: Synthetic polypeptide

SEQ ID NO: 1741 - protein, 115 aa, Artificial Sequence; identical to SEQ ID NO: 81
  Description of Artificial Sequence: Synthetic polypeptide

SEQ ID NO: 1742 - protein, 118 aa, Artificial Sequence; identical to SEQ ID NO: 83
  Description of Artificial Sequence: Synthetic polypeptide

SEQ ID NO: 1743 - protein, 118 aa, Artificial Sequence; identical to SEQ ID NO: 85
  Description of Artificial Sequence: Synthetic polypeptide

SEQ ID NO: 1744 - protein, 119 aa, Artificial Sequence; identical to SEQ ID NO: 87
  Description of Artificial Sequence: Synthetic polypeptide

SEQ ID NO: 1745 - protein, 119 aa, Artificial Sequence; identical to SEQ ID NO: 89
  Description of Artificial Sequence: Synthetic polypeptide

SEQ ID NO: 1746 - protein, 121 aa, Artificial Sequence; identical to SEQ ID NO: 91
  Description of Artificial Sequence: Synthetic polypeptide

SEQ ID NO: 1747 - protein, 118 aa, Artificial Sequence
  Description of Artificial Sequence: Synthetic polypeptide
QMQLVQSGTEVKKPGESLKISCKGSGYGFITYWIGWVRQMPGKGLEWMGIIYPGDSETRYSPSFQGQVTISADKSINTAYLQWSSLKASDTAIYYCAGGSGISTPMDVWGQGTTVTVA

SEQ ID NO: 1748 - protein, 8 aa, Artificial Sequence
  Description of Artificial Sequence: Synthetic peptide
SSNIGSNT

SEQ ID NO: 1749 - protein, 8 aa, Artificial Sequence
  Description of Artificial Sequence: Synthetic peptide
SGSIASNY

SEQ ID NO: 1750 - protein, 8 aa, Artificial Sequence
  Description of Artificial Sequence: Synthetic peptide
SSNIGSND

SEQ ID NO: 1751 - protein, 8 aa, Artificial Sequence
  Description of Artificial Sequence: Synthetic peptide
SGSIASNY

SEQ ID NO: 1752 - protein, 8 aa, Artificial Sequence
  Description of Artificial Sequence: Synthetic peptide
TGSIAGNY

SEQ ID NO: 1753 - protein, 8 aa, Artificial Sequence
  Description of Artificial Sequence: Synthetic peptide
TSNIGNNA

SEQ ID NO: 1754 - protein, 8 aa, Artificial Sequence
  Description of Artificial Sequence: Synthetic peptide
SGSIASNY

SEQ ID NO: 1755 - protein, 8 aa, Artificial Sequence
  Description of Artificial Sequence: Synthetic peptide
SSNIGSNS

SEQ ID NO: 1756 - protein, 9 aa, Artificial Sequence
  Description of Artificial Sequence: Synthetic peptide
SSDVGGYNY

SEQ ID NO: 1757 - protein, 6 aa, Artificial Sequence
  Description of Artificial Sequence: Synthetic peptide
KIGSKS

SEQ ID NO: 1758 - protein, 6 aa, Artificial Sequence
  Description of Artificial Sequence: Synthetic peptide
SLRAYF

SEQ ID NO: 1759 - protein, 9 aa, Artificial Sequence
  Description of Artificial Sequence: Synthetic peptide
SSDVGTYNR

SEQ ID NO: 1760 - protein, 8 aa, Artificial Sequence
  Description of Artificial Sequence: Synthetic peptide
DSDIGANF

SEQ ID NO: 1761 - protein, 8 aa, Artificial Sequence
  Description of Artificial Sequence: Synthetic peptide
SGSIARNY

SEQ ID NO: 1762 - protein, 6 aa, Artificial Sequence
  Description of Artificial Sequence: Synthetic peptide
SLRSYY

SEQ ID NO: 1763 - protein, 6 aa, Artificial Sequence
  Description of Artificial Sequence: Synthetic peptide
QSVSNN

SEQ ID NO: 1764 - protein, 9 aa, Artificial Sequence
  Description of Artificial Sequence: Synthetic peptide
SSDVGAYNY

SEQ ID NO: 1765 - protein, 8 aa, Artificial Sequence
  Description of Artificial Sequence: Synthetic peptide
SNNVGNQG

SEQ ID NO: 1766 - protein, 8 aa, Artificial Sequence
  Description of Artificial Sequence: Synthetic peptide
SGSIASNY

SEQ ID NO: 1767 - protein, 8 aa, Artificial Sequence
  Description of Artificial Sequence: Synthetic peptide
SGSIASNY

SEQ ID NO: 1768 - protein, 6 aa, Artificial Sequence
  Description of Artificial Sequence: Synthetic peptide
NIGSKS

SEQ ID NO: 1769 - protein, 9 aa, Artificial Sequence
  Description of Artificial Sequence: Synthetic peptide
SSDVGGYNL

SEQ ID NO: 1770 - protein, 8 aa, Artificial Sequence
  Description of Artificial Sequence: Synthetic peptide
SSNIGSNP

SEQ ID NO: 1771 - protein, 8 aa, Artificial Sequence
  Description of Artificial Sequence: Synthetic peptide
SGSIASNY

SEQ ID NO: 1772 - protein, 6 aa, Artificial Sequence
  Description of Artificial Sequence: Synthetic peptide
NIGSES

SEQ ID NO: 1773 - protein, 8 aa, Artificial Sequence
  Description of Artificial Sequence: Synthetic peptide
SGNIATNY

SEQ ID NO: 1774 - protein, 6 aa, Artificial Sequence
  Description of Artificial Sequence: Synthetic peptide
QSVSSN

SEQ ID NO: 1775 - protein, 8 aa, Artificial Sequence
  Description of Artificial Sequence: Synthetic peptide
SGSIVSSY

SEQ ID NO: 1776 - protein, 9 aa, Artificial Sequence
  Description of Artificial Sequence: Synthetic peptide
SSDLGTYNY

SEQ ID NO: 1777 - protein, 6 aa, Artificial Sequence
  Description of Artificial Sequence: Synthetic peptide
SIGTKS

SEQ ID NO: 1778 - protein, 6 aa, Artificial Sequence
  Description of Artificial Sequence: Synthetic peptide
SLRRYY

SEQ ID NO: 1779 - protein, 9 aa, Artificial Sequence
  Description of Artificial Sequence: Synthetic peptide
SSDVGGYKY

SEQ ID NO: 1780 - protein, 6 aa, Artificial Sequence
  Description of Artificial Sequence: Synthetic peptide
NIRTKG

SEQ ID NO: 1781 - protein, 9 aa, Artificial Sequence
  Description of Artificial Sequence: Synthetic peptide
SSDVGGYDY

SEQ ID NO: 1782 - protein, 9 aa, Artificial Sequence
  Description of Artificial Sequence: Synthetic peptide
SRDVGSYDL

SEQ ID NO: 1783 - protein, 8 aa, Artificial Sequence
  Description of Artificial Sequence: Synthetic peptide
GGSIASNY

SEQ ID NO: 1784 - protein, 7 aa, Artificial Sequence
  Description of Artificial Sequence: Synthetic peptide
SSIGSND

SEQ ID NO: 1785 - protein, 8 aa, Artificial Sequence
  Description of Artificial Sequence: Synthetic peptide
SSNIGSNT

SEQ ID NO: 1786 - protein, 8 aa, Artificial Sequence
  Description of Artificial Sequence: Synthetic peptide
SSNIGSNT

SEQ ID NO: 1787 - protein, 8 aa, Artificial Sequence
  Description of Artificial Sequence: Synthetic peptide
SSNIGSNT

SEQ ID NO: 1788 - protein, 8 aa, Artificial Sequence
  Description of Artificial Sequence: Synthetic peptide
SSNIGSNP

SEQ ID NO: 1789 - protein, 6 aa, Artificial Sequence
  Description of Artificial Sequence: Synthetic peptide
SLRSYY

SEQ ID NO: 1790 - protein, 8 aa, Artificial Sequence
  Description of Artificial Sequence: Synthetic peptide
SSNIGSNP

SEQ ID NO: 1791 - protein, 8 aa, Artificial Sequence
  Description of Artificial Sequence: Synthetic peptide
SSNIGGNS

SEQ ID NO: 1792 - protein, 8 aa, Artificial Sequence
  Description of Artificial Sequence: Synthetic peptide
SGSIASNY

SEQ ID NO: 1793 - protein, 12 aa, Artificial Sequence
  Description of Artificial Sequence: Synthetic peptide
QSVLYSSINKNY

SEQ ID NO: 1794 - protein, 3 aa, Artificial Sequence
  Description of Artificial Sequence: Synthetic peptide
SNN

SEQ ID NO: 1795 - protein, 3 aa, Artificial Sequence
  Description of Artificial Sequence: Synthetic peptide
EDN

SEQ ID NO: 1796 - protein, 3 aa, Artificial Sequence
  Description of Artificial Sequence: Synthetic peptide
SNN

SEQ ID NO: 1797 - protein, 3 aa, Artificial Sequence
  Description of Artificial Sequence: Synthetic peptide
QDK

SEQ ID NO: 1798 - protein, 3 aa, Artificial Sequence
  Description of Artificial Sequence: Synthetic peptide
DDN

SEQ ID NO: 1799 - protein, 3 aa, Artificial Sequence
  Description of Artificial Sequence: Synthetic peptide
YNE

SEQ ID NO: 1800 - protein, 3 aa, Artificial Sequence
  Description of Artificial Sequence: Synthetic peptide
EDN

SEQ ID NO: 1801 - protein, 3 aa, Artificial Sequence
  Description of Artificial Sequence: Synthetic peptide
SNN

SEQ ID NO: 1802 - protein, 3 aa, Artificial Sequence
  Description of Artificial Sequence: Synthetic peptide
EVS

SEQ ID NO: 1803 - protein, 3 aa, Artificial Sequence
  Description of Artificial Sequence: Synthetic peptide
DDS

SEQ ID NO: 1804 - protein, 3 aa, Artificial Sequence
  Description of Artificial Sequence: Synthetic peptide
GQD

SEQ ID NO: 1805 - protein, 3 aa, Artificial Sequence
  Description of Artificial Sequence: Synthetic peptide
EVS

SEQ ID NO: 1806 - protein, 3 aa, Artificial Sequence
  Description of Artificial Sequence: Synthetic peptide
RNT

SEQ ID NO: 1807 - protein, 3 aa, Artificial Sequence
  Description of Artificial Sequence: Synthetic peptide
ADR

SEQ ID NO: 1808 - protein, 3 aa, Artificial Sequence
  Description of Artificial Sequence: Synthetic peptide
DKD

SEQ ID NO: 1809 - protein, 3 aa, Artificial Sequence
  Description of Artificial Sequence: Synthetic peptide
DAT

SEQ ID NO: 1810 - protein, 3 aa, Artificial Sequence
  Description of Artificial Sequence: Synthetic peptide
DVT

SEQ ID NO: 1811 - protein, 3 aa, Artificial Sequence
  Description of Artificial Sequence: Synthetic peptide
MNN

SEQ ID NO: 1812 - protein, 3 aa, Artificial Sequence
  Description of Artificial Sequence: Synthetic peptide
EDS

SEQ ID NO: 1813 - protein, 3 aa, Artificial Sequence
  Description of Artificial Sequence: Synthetic peptide
EDN

SEQ ID NO: 1814 - protein, 3 aa, Artificial Sequence
  Description of Artificial Sequence: Synthetic peptide
EDR

SEQ ID NO: 1815 - protein, 3 aa, Artificial Sequence
  Description of Artificial Sequence: Synthetic peptide
EGS

SEQ ID NO: 1816 - protein, 3 aa, Artificial Sequence
  Description of Artificial Sequence: Synthetic peptide
SNN

SEQ ID NO: 1817 - protein, 3 aa, Artificial Sequence
  Description of Artificial Sequence: Synthetic peptide
EDN

SEQ ID NO: 1818 - protein, 3 aa, Artificial Sequence
  Description of Artificial Sequence: Synthetic peptide
EDR

SEQ ID NO: 1819 - protein, 3 aa, Artificial Sequence
  Description of Artificial Sequence: Synthetic peptide
EDN

SEQ ID NO: 1820 - protein, 3 aa, Artificial Sequence
  Description of Artificial Sequence: Synthetic peptide
DVS

SEQ ID NO: 1821 - protein, 3 aa, Artificial Sequence
  Description of Artificial Sequence: Synthetic peptide
EHN

SEQ ID NO: 1822 - protein, 3 aa, Artificial Sequence
  Description of Artificial Sequence: Synthetic peptide
DVF

SEQ ID NO: 1823 - protein, 3 aa, Artificial Sequence
  Description of Artificial Sequence: Synthetic peptide
DDD

SEQ ID NO: 1824 - protein, 3 aa, Artificial Sequence
  Description of Artificial Sequence: Synthetic peptide
GKN

SEQ ID NO: 1825 - protein, 3 aa, Artificial Sequence
  Description of Artificial Sequence: Synthetic peptide
DVN

SEQ ID NO: 1826 - protein, 3 aa, Artificial Sequence
  Description of Artificial Sequence: Synthetic peptide
YAS

SEQ ID NO: 1827 - protein, 3 aa, Artificial Sequence
  Description of Artificial Sequence: Synthetic peptide
DVS

SEQ ID NO: 1828 - protein, 3 aa, Artificial Sequence
  Description of Artificial Sequence: Synthetic peptide
EGS

SEQ ID NO: 1829 - protein, 3 aa, Artificial Sequence
  Description of Artificial Sequence: Synthetic peptide
EDN

SEQ ID NO: 1830 - protein, 3 aa, Artificial Sequence
  Description of Artificial Sequence: Synthetic peptide
SNN

SEQ ID NO: 1831 - protein, 3 aa, Artificial Sequence
  Description of Artificial Sequence: Synthetic peptide
INN

SEQ ID NO: 1832 - protein, 3 aa, Artificial Sequence
  Description of Artificial Sequence: Synthetic peptide
INN

SEQ ID NO: 1833 - protein, 3 aa, Artificial Sequence
  Description of Artificial Sequence: Synthetic peptide
SNN

SEQ ID NO: 1834 - protein, 3 aa, Artificial Sequence
  Description of Artificial Sequence: Synthetic peptide
NNN

SEQ ID NO: 1835 - protein, 3 aa, Artificial Sequence
  Description of Artificial Sequence: Synthetic peptide
GKN

SEQ ID NO: 1836 - protein, 3 aa, Artificial Sequence
  Description of Artificial Sequence: Synthetic peptide
DNN

SEQ ID NO: 1837 - protein, 3 aa, Artificial Sequence
  Description of Artificial Sequence: Synthetic peptide
RNN

SEQ ID NO: 1838 - protein, 3 aa, Artificial Sequence
  Description of Artificial Sequence: Synthetic peptide
EDN

SEQ ID NO: 1839 - protein, 3 aa, Artificial Sequence
  Description of Artificial Sequence: Synthetic peptide
WAS

SEQ ID NO: 1840 - protein, 12 aa, Artificial Sequence
  Description of Artificial Sequence: Synthetic peptide
AAWDDSLNVHYV

SEQ ID NO: 1841 - protein, 10 aa, Artificial Sequence
  Description of Artificial Sequence: Synthetic peptide
QSFDSASLWV

SEQ ID NO: 1842 - protein, 11 aa, Artificial Sequence
  Description of Artificial Sequence: Synthetic peptide
ATWDDSLSAGV

SEQ ID NO: 1843 - protein, 10 aa, Artificial Sequence
  Description of Artificial Sequence: Synthetic peptide
QSYDSSSLWV

SEQ ID NO: 1844 - protein, 10 aa, Artificial Sequence
  Description of Artificial Sequence: Synthetic peptide
QSYDSGNRGV

SEQ ID NO: 1845 - protein, 12 aa, Artificial Sequence
  Description of Artificial Sequence: Synthetic peptide
AAWDDSLSGHVV

SEQ ID NO: 1846 - protein, 10 aa, Artificial Sequence
  Description of Artificial Sequence: Synthetic peptide
QSYDSSSLWV

SEQ ID NO: 1847 - protein, 11 aa, Artificial Sequence
  Description of Artificial Sequence: Synthetic peptide
AAWDDSLTGYV

SEQ ID NO: 1848 - protein, 11 aa, Artificial Sequence
  Description of Artificial Sequence: Synthetic peptide
AAWDDSLSGPV

SEQ ID NO: 1849 - protein, 11 aa, Artificial Sequence
  Description of Artificial Sequence: Synthetic peptide
HVWDSSSDQNV

SEQ ID NO: 1850 - protein, 11 aa, Artificial Sequence
  Description of Artificial Sequence: Synthetic peptide
NSRDSGENHLI

SEQ ID NO: 1851 - protein, 10 aa, Artificial Sequence
  Description of Artificial Sequence: Synthetic peptide
SSYTRTFTYV

SEQ ID NO: 1852 - protein, 11 aa, Artificial Sequence
  Description of Artificial Sequence: Synthetic peptide
QSYDSSLSAYV

SEQ ID NO: 1853 - protein, 11 aa, Artificial Sequence
  Description of Artificial Sequence: Synthetic peptide
QSYDSSNQAAV

SEQ ID NO: 1854 - protein, 11 aa, Artificial Sequence
  Description of Artificial Sequence: Synthetic peptide
NSRDRSDNHVV

SEQ ID NO: 1855 - protein, 8 aa, Artificial Sequence
  Description of Artificial Sequence: Synthetic peptide
QQYDNLPV

SEQ ID NO: 1856 - protein, 12 aa, Artificial Sequence
  Description of Artificial Sequence: Synthetic peptide
AVWDDGLNGRVV

SEQ ID NO: 1857 - protein, 11 aa, Artificial Sequence
  Description of Artificial Sequence: Synthetic peptide
SAWDSSLSRWV

SEQ ID NO: 1858 - protein, 10 aa, Artificial Sequence
  Description of Artificial Sequence: Synthetic peptide
QSFHNSNPVI

SEQ ID NO: 1859 - protein, 10 aa, Artificial Sequence
  Description of Artificial Sequence: Synthetic peptide
QSYDSSNHWV

SEQ ID NO: 1860 - protein, 11 aa, Artificial Sequence
  Description of Artificial Sequence: Synthetic peptide
QVWDGDSDHYV

SEQ ID NO: 1861 - protein, 10 aa, Artificial Sequence
  Description of Artificial Sequence: Synthetic peptide
SSYTITDVVV

SEQ ID NO: 1862 - protein, 11 aa, Artificial Sequence
  Description of Artificial Sequence: Synthetic peptide
AAWDDSLSGVV

SEQ ID NO: 1863 - protein, 9 aa, Artificial Sequence
  Description of Artificial Sequence: Synthetic peptide
QSYDSTNWV

SEQ ID NO: 1864 - protein, 12 aa, Artificial Sequence
  Description of Artificial Sequence: Synthetic peptide
QVWNPSGSLQYV

SEQ ID NO: 1865 - protein, 9 aa, Artificial Sequence
  Description of Artificial Sequence: Synthetic peptide
KSYDDGNHV

SEQ ID NO: 1866 - protein, 9 aa, Artificial Sequence
  Description of Artificial Sequence: Synthetic peptide
QQRGVWPLT

SEQ ID NO: 1867 - protein, 9 aa, Artificial Sequence
  Description of Artificial Sequence: Synthetic peptide
QSYDSQNGV

SEQ ID NO: 1868 - protein, 10 aa, Artificial Sequence
  Description of Artificial Sequence: Synthetic peptide
SSYTSSSTYV

SEQ ID NO: 1869 - protein, 11 aa, Artificial Sequence
  Description of Artificial Sequence: Synthetic peptide
QVWESDDDDLV

SEQ ID NO: 1870 - protein, 13 aa, Artificial Sequence
  Description of Artificial Sequence: Synthetic peptide
NSRDISDNQWQWI

SEQ ID NO: 1871 - protein, 11 aa, Artificial Sequence
  Description of Artificial Sequence: Synthetic peptide
SSYTGRMNLYV

SEQ ID NO: 1872 - protein, 11 aa, Artificial Sequence
  Description of Artificial Sequence: Synthetic peptide
QVWDSSSDLVV

SEQ ID NO: 1873 - protein, 10 aa, Artificial Sequence
  Description of Artificial Sequence: Synthetic peptide
SSYTSSSPVV

SEQ ID NO: 1874 - protein, 10 aa, Artificial Sequence
  Description of Artificial Sequence: Synthetic peptide
SSYTSSNSLV

SEQ ID NO: 1875 - protein, 10 aa, Artificial Sequence
  Description of Artificial Sequence: Synthetic peptide
QSYDSSNPVV

SEQ ID NO: 1876 - protein, 10 aa, Artificial Sequence
  Description of Artificial Sequence: Synthetic peptide
AWDDSLSAVV

SEQ ID NO: 1877 - protein, 12 aa, Artificial Sequence
  Description of Artificial Sequence: Synthetic peptide
AEWYDSLNVHYV

SEQ ID NO: 1878 - protein, 12 aa, Artificial Sequence
  Description of Artificial Sequence: Synthetic peptide
AECYDSLNDHYV

SEQ ID NO: 1879 - protein, 12 aa, Artificial Sequence
  Description of Artificial Sequence: Synthetic peptide
AAWDDSLNVHYV

SEQ ID NO: 1880 - protein, 10 aa, Artificial Sequence
  Description of Artificial Sequence: Synthetic peptide
AAWDDSLNGL

SEQ ID NO: 1881 - protein, 11 aa, Artificial Sequence
  Description of Artificial Sequence: Synthetic peptide
NSRDSSGDVRV

SEQ ID NO: 1882 - protein, 11 aa, Artificial Sequence
  Description of Artificial Sequence: Synthetic peptide
EAWDDSLSGPV

SEQ ID NO: 1883 - protein, 11 aa, Artificial Sequence
  Description of Artificial Sequence: Synthetic peptide
AAWDDSLNGWV

SEQ ID NO: 1884 - protein, 11 aa, Artificial Sequence
  Description of Artificial Sequence: Synthetic peptide
QSYDPNNHGVV

SEQ ID NO: 1885 - protein, 9 aa, Artificial Sequence
  Description of Artificial Sequence: Synthetic peptide
QQYYSTPYT

SEQ ID NO: 1886 - protein, 111 aa, Artificial Sequence; identical to SEQ ID NO: 2
  Description of Artificial Sequence: Synthetic polypeptide

SEQ ID NO: 1887 - protein, 111 aa, Artificial Sequence; identical to SEQ ID NO: 4
  Description of Artificial Sequence: Synthetic polypeptide

SEQ ID NO: 1888 - protein, 110 aa, Artificial Sequence; identical to SEQ ID NO: 6
  Description of Artificial Sequence: Synthetic polypeptide

SEQ ID NO: 1889 - protein, 111 aa, Artificial Sequence; identical to SEQ ID NO: 8
  Description of Artificial Sequence: Synthetic polypeptide

SEQ ID NO: 1890 - protein, 111 aa, Artificial Sequence; identical to SEQ ID NO: 10
  Description of Artificial Sequence: Synthetic polypeptide

SEQ ID NO: 1891 - protein, 111 aa, Artificial Sequence; identical to SEQ ID NO: 12
  Description of Artificial Sequence: Synthetic polypeptide

SEQ ID NO: 1892 - protein, 111 aa, Artificial Sequence; identical to SEQ ID NO: 14
  Description of Artificial Sequence: Synthetic polypeptide

SEQ ID NO: 1893 - protein, 110 aa, Artificial Sequence; identical to SEQ ID NO: 16
  Description of Artificial Sequence: Synthetic polypeptide

SEQ ID NO: 1894 - protein, 111 aa, Artificial Sequence; identical to SEQ ID NO: 18
  Description of Artificial Sequence: Synthetic polypeptide

SEQ ID NO: 1895 - protein, 108 aa, Artificial Sequence; identical to SEQ ID NO: 20
  Description of Artificial Sequence: Synthetic polypeptide

SEQ ID NO: 1896 - protein, 108 aa, Artificial Sequence; identical to SEQ ID NO: 22
  Description of Artificial Sequence: Synthetic polypeptide

SEQ ID NO: 1897 - protein, 110 aa, Artificial Sequence; identical to SEQ ID NO: 24
  Description of Artificial Sequence: Synthetic polypeptide

SEQ ID NO: 1898 - protein, 110 aa, Artificial Sequence; identical to SEQ ID NO: 26
  Description of Artificial Sequence: Synthetic polypeptide

SEQ ID NO: 1899 - protein, 112 aa, Artificial Sequence; identical to SEQ ID NO: 28
  Description of Artificial Sequence: Synthetic polypeptide

SEQ ID NO: 1900 - protein, 108 aa, Artificial Sequence; identical to SEQ ID NO: 30
  Description of Artificial Sequence: Synthetic polypeptide

SEQ ID NO: 1901 - protein, 106 aa, Artificial Sequence; identical to SEQ ID NO: 32
  Description of Artificial Sequence: Synthetic polypeptide

SEQ ID NO: 1902 - protein, 112 aa, Artificial Sequence; identical to SEQ ID NO: 34
  Description of Artificial Sequence: Synthetic polypeptide

SEQ ID NO: 1903 - protein, 110 aa, Artificial Sequence; identical to SEQ ID NO: 36
  Description of Artificial Sequence: Synthetic polypeptide

SEQ ID NO: 1904 - protein, 111 aa, Artificial Sequence; identical to SEQ ID NO: 38
  Description of Artificial Sequence: Synthetic polypeptide

SEQ ID NO: 1905 - protein, 111 aa, Artificial Sequence; identical to SEQ ID NO: 40
  Description of Artificial Sequence: Synthetic polypeptide

SEQ ID NO: 1906 - protein, 108 aa, Artificial Sequence; identical to SEQ ID NO: 42
  Description of Artificial Sequence: Synthetic polypeptide

SEQ ID NO: 1907 - protein, 110 aa, Artificial Sequence; identical to SEQ ID NO: 44
  Description of Artificial Sequence: Synthetic polypeptide

SEQ ID NO: 1908 - protein, 110 aa, Artificial Sequence; identical to SEQ ID NO: 48
  Description of Artificial Sequence: Synthetic polypeptide

SEQ ID NO: 1909 - protein, 110 aa, Artificial Sequence; identical to SEQ ID NO: 50
  Description of Artificial Sequence: Synthetic polypeptide

SEQ ID NO: 1910 - protein, 109 aa, Artificial Sequence; identical to SEQ ID NO: 52
  Description of Artificial Sequence: Synthetic polypeptide

SEQ ID NO: 1911 - protein, 110 aa, Artificial Sequence; identical to SEQ ID NO: 54
  Description of Artificial Sequence: Synthetic polypeptide

SEQ ID NO: 1912 - protein, 107 aa, Artificial Sequence; identical to SEQ ID NO: 56
  Description of Artificial Sequence: Synthetic polypeptide

SEQ ID NO: 1913 - protein, 110 aa, Artificial Sequence; identical to SEQ ID NO: 58
  Description of Artificial Sequence: Synthetic polypeptide

SEQ ID NO: 1914 - protein, 110 aa, Artificial Sequence; identical to SEQ ID NO: 60
  Description of Artificial Sequence: Synthetic polypeptide

SEQ ID NO: 1915 - protein, 108 aa, Artificial Sequence; identical to SEQ ID NO: 62
  Description of Artificial Sequence: Synthetic polypeptide

SEQ ID NO: 1916 - protein, 110 aa, Artificial Sequence; identical to SEQ ID NO: 64
  Description of Artificial Sequence: Synthetic polypeptide

SEQ ID NO: 1917 - protein, 111 aa, Artificial Sequence; identical to SEQ ID NO: 66
  Description of Artificial Sequence: Synthetic polypeptide

SEQ ID NO: 1918 - protein, 108 aa, Artificial Sequence; identical to SEQ ID NO: 68
  Description of Artificial Sequence: Synthetic polypeptide

SEQ ID NO: 1919 - protein, 110 aa, Artificial Sequence; identical to SEQ ID NO: 70
  Description of Artificial Sequence: Synthetic polypeptide

SEQ ID NO: 1920 - protein, 110 aa, Artificial Sequence; identical to SEQ ID NO: 72
  Description of Artificial Sequence: Synthetic polypeptide

SEQ ID NO: 1921 - protein, 111 aa, Artificial Sequence; identical to SEQ ID NO: 74
  Description of Artificial Sequence: Synthetic polypeptide

SEQ ID NO: 1922 - protein, 108 aa, Artificial Sequence; identical to SEQ ID NO: 76
  Description of Artificial Sequence: Synthetic polypeptide

SEQ ID NO: 1923 - protein, 111 aa, Artificial Sequence; identical to SEQ ID NO: 78
  Description of Artificial Sequence: Synthetic polypeptide

SEQ ID NO: 1924 - protein, 111 aa, Artificial Sequence; identical to SEQ ID NO: 80
  Description of Artificial Sequence: Synthetic polypeptide

SEQ ID NO: 1925 - protein, 111 aa, Artificial Sequence; identical to SEQ ID NO: 82
  Description of Artificial Sequence: Synthetic polypeptide

SEQ ID NO: 1926 - protein, 109 aa, Artificial Sequence; identical to SEQ ID NO: 84
  Description of Artificial Sequence: Synthetic polypeptide

SEQ ID NO: 1927 - protein, 108 aa, Artificial Sequence; identical to SEQ ID NO: 86
  Description of Artificial Sequence: Synthetic polypeptide

SEQ ID NO: 1928 - protein, 110 aa, Artificial Sequence; identical to SEQ ID NO: 88
  Description of Artificial Sequence: Synthetic polypeptide

SEQ ID NO: 1929 - protein, 110 aa, Artificial Sequence; identical to SEQ ID NO: 90
  Description of Artificial Sequence: Synthetic polypeptide

SEQ ID NO: 1930 - protein, 112 aa, Artificial Sequence; identical to SEQ ID NO: 92
  Description of Artificial Sequence: Synthetic polypeptide

SEQ ID NO: 1931 - protein, 113 aa, Artificial Sequence
  Description of Artificial Sequence: Synthetic polypeptide
DIQLTQSPDSLAVSLGERATINCKSSQSVLYSSINKNYLAWYQQKPGQPPKLLIYWASTRESGVPDRFSGSGSGTDFTLTISSLQAEDVAVYYCQQYYSTPYTFGQGTKVEIK

SEQ ID NO: 1932 - DNA, 24 bp, Artificial Sequence
  Description of Artificial Sequence: Synthetic oligonucleotide
ggattcaccttcagtgactttcct

SEQ ID NO: 1933 - DNA, 24 bp, Artificial Sequence
  Description of Artificial Sequence: Synthetic oligonucleotide
ggatacagctttaccagctactgg

SEQ ID NO: 1934 - DNA, 24 bp, Artificial Sequence
  Description of Artificial Sequence: Synthetic oligonucleotide
ggtggctccatcagtagttattac

SEQ ID NO: 1935 - DNA, 30 bp, Artificial Sequence
  Description of Artificial Sequence: Synthetic oligonucleotide
ggcgacagtgtctccagtagaagttctgcc

SEQ ID NO: 1936 - DNA, 24 bp, Artificial Sequence
  Description of Artificial Sequence: Synthetic oligonucleotide
ggattcacctttagtcactatgac

SEQ ID NO: 1937 - DNA, 24 bp, Artificial Sequence
  Description of Artificial Sequence: Synthetic oligonucleotide
ggattcacctttgatgattatgcc

SEQ ID NO: 1938 - DNA, 24 bp, Artificial Sequence
  Description of Artificial Sequence: Synthetic oligonucleotide
ggttacacctttaccacctctggt

SEQ ID NO: 1939 - DNA, 24 bp, Artificial Sequence
  Description of Artificial Sequence: Synthetic oligonucleotide
ggattcaccttcactacgtatggc

SEQ ID NO: 1940 - DNA, 24 bp, Artificial Sequence
  Description of Artificial Sequence: Synthetic oligonucleotide
ggattcaccttcagtagtcatgct

SEQ ID NO: 1941 - DNA, 24 bp, Artificial Sequence
  Description of Artificial Sequence: Synthetic oligonucleotide
ggattcaccttcagtgattatcct

SEQ ID NO: 1942 - DNA, 24 bp, Artificial Sequence
  Description of Artificial Sequence: Synthetic oligonucleotide
ggaggcaccttcagcagctatgct

SEQ ID NO: 1943 - DNA, 24 bp, Artificial Sequence
  Description of Artificial Sequence: Synthetic oligonucleotide
ggtggctccatcagaactcactcc

SEQ ID NO: 1944 - DNA, 24 bp, Artificial Sequence
  Description of Artificial Sequence: Synthetic oligonucleotide
ggtggctccatcagaactcactcc

SEQ ID NO: 1945 - DNA, 24 bp, Artificial Sequence
  Description of Artificial Sequence: Synthetic oligonucleotide
ggatacaccttctccgactattat

SEQ ID NO: 1946 - DNA, 24 bp, Artificial Sequence
  Description of Artificial Sequence: Synthetic oligonucleotide
ggaggcaccttcagcagctatact

SEQ ID NO: 1947 - DNA, 24 bp, Artificial Sequence
  Description of Artificial Sequence: Synthetic oligonucleotide
ggattcaccttcagtagctatgcc

SEQ ID NO: 1948 - DNA, 30 bp, Artificial Sequence
  Description of Artificial Sequence: Synthetic oligonucleotide
ggggacagtgtctctagctacagtgatgct

SEQ ID NO: 1949 - DNA, 24 bp, Artificial Sequence
  Description of Artificial Sequence: Synthetic oligonucleotide
ggattcacctttgatgattatgcc

SEQ ID NO: 1950 - DNA, 24 bp, Artificial Sequence
  Description of Artificial Sequence: Synthetic oligonucleotide
ggatacagcttcaccggctcccat

SEQ ID NO: 1951 - DNA, 30 bp, Artificial Sequence
  Description of Artificial Sequence: Synthetic oligonucleotide
ggattctcactcagtactactggagtgggt

SEQ ID NO: 1952 - DNA, 30 bp, Artificial Sequence
  Description of Artificial Sequence: Synthetic oligonucleotide
ggggtctcactcgacactattggaatgcgt

SEQ ID NO: 1953 - DNA, 24 bp, Artificial Sequence
  Description of Artificial Sequence: Synthetic oligonucleotide
ggatacagctttaccagcaactgg

SEQ ID NO: 1954 - DNA, 24 bp, Artificial Sequence
  Description of Artificial Sequence: Synthetic oligonucleotide
ggattcacctttagtagctattgg

SEQ ID NO: 1955 - DNA, 24 bp, Artificial Sequence
  Description of Artificial Sequence: Synthetic oligonucleotide
ggttacacctttaccagctatggt

SEQ ID NO: 1956 - DNA, 24 bp, Artificial Sequence
  Description of Artificial Sequence: Synthetic oligonucleotide
ggaggcaccttcagcagctatgct

SEQ ID NO: 1957 - DNA, 24 bp, Artificial Sequence
  Description of Artificial Sequence: Synthetic oligonucleotide
ggttacacttttaccagctacggt

SEQ ID NO: 1958 - DNA, 30 bp, Artificial Sequence
  Description of Artificial Sequence: Synthetic oligonucleotide
gggttctcactcaccactactggagtgagt

SEQ ID NO: 1959 - DNA, 30 bp, Artificial Sequence
  Description of Artificial Sequence: Synthetic oligonucleotide
ggattctcactcagcaccagtgcaatgtgt

SEQ ID NO: 1960 - DNA, 24 bp, Artificial Sequence
  Description of Artificial Sequence: Synthetic oligonucleotide
ggattcaccttcagtgactactac

SEQ ID NO: 1961 - DNA, 24 bp, Artificial Sequence
  Description of Artificial Sequence: Synthetic oligonucleotide
ggattcgccttcagtgactttcct

SEQ ID NO: 1962 - DNA, 24 bp, Artificial Sequence
  Description of Artificial Sequence: Synthetic oligonucleotide
ggattcaccttcagtagctatgct

SEQ ID NO: 1963 - DNA, 24 bp, Artificial Sequence
  Description of Artificial Sequence: Synthetic oligonucleotide
ggattcccctttaatgcctattac

SEQ ID NO: 1964 - DNA, 24 bp, Artificial Sequence
  Description of Artificial Sequence: Synthetic oligonucleotide
ggattcacctttgatgattatgcc

SEQ ID NO: 1965 - DNA, 24 bp, Artificial Sequence
  Description of Artificial Sequence: Synthetic oligonucleotide
ggattcacctttgatgattatgcc

SEQ ID NO: 1966 - DNA, 27 bp, Artificial Sequence
  Description of Artificial Sequence: Synthetic oligonucleotide
ggtggctccatcagcagtagtaactgg

SEQ ID NO: 1967 - DNA, 24 bp, Artificial Sequence
  Description of Artificial Sequence: Synthetic oligonucleotide
ggtgcctccatcagtaattctttc

SEQ ID NO: 1968 - DNA, 24 bp, Artificial Sequence
  Description of Artificial Sequence: Synthetic oligonucleotide
ggaggctccttcacaactcactcc

SEQ ID NO: 1969 - DNA, 24 bp, Artificial Sequence
  Description of Artificial Sequence: Synthetic oligonucleotide
ggaggctccttcagaactcactcc

SEQ ID NO: 1970 - DNA, 24 bp, Artificial Sequence
  Description of Artificial Sequence: Synthetic oligonucleotide
ggtggctccatcagaactcactcc

SEQ ID NO: 1971 - DNA, 24 bp, Artificial Sequence
  Description of Artificial Sequence: Synthetic oligonucleotide
ggtggctccatcagaactcactcc

SEQ ID NO: 1972 - DNA, 24 bp, Artificial Sequence
  Description of Artificial Sequence: Synthetic oligonucleotide
ggatacagctttaccagctactgg

SEQ ID NO: 1973 - DNA, 24 bp, Artificial Sequence
  Description of Artificial Sequence: Synthetic oligonucleotide
agatacagctttagcaactactgg

SEQ ID NO: 1974 - DNA, 24 bp, Artificial Sequence
  Description of Artificial Sequence: Synthetic oligonucleotide
ggatacagctttaccagctactgg

SEQ ID NO: 1975 - DNA, 24 bp, Artificial Sequence
  Description of Artificial Sequence: Synthetic oligonucleotide
ggatacagctttaccagctactgg

SEQ ID NO: 1976 - DNA, 30 bp, Artificial Sequence
  Description of Artificial Sequence: Synthetic oligonucleotide
ggggacagtgttactagcaacagtgctgct

SEQ ID NO: 1977 - DNA, 24 bp, Artificial Sequence
  Description of Artificial Sequence: Synthetic oligonucleotide
atatcatacgatggaaatattaaa

SEQ ID NO: 1978 - DNA, 24 bp, Artificial Sequence
  Description of Artificial Sequence: Synthetic oligonucleotide
atctatcctggtgactctgatacc

SEQ ID NO: 1979 - DNA, 21 bp, Artificial Sequence
  Description of Artificial Sequence: Synthetic oligonucleotide
atctataccagtgggagcacc

SEQ ID NO: 1980 - DNA, 27 bp, Artificial Sequence
  Description of Artificial Sequence: Synthetic oligonucleotide
acatactacaggtccaactggaattat

SEQ ID NO: 1981 - DNA, 24 bp, Artificial Sequence
  Description of Artificial Sequence: Synthetic oligonucleotide
ataggctatgatggaactaatcta

SEQ ID NO: 1982 - DNA, 24 bp, Artificial Sequence
  Description of Artificial Sequence: Synthetic oligonucleotide
attgattggaatagtggtgtcata

SEQ ID NO: 1983 - DNA, 24 bp, Artificial Sequence
  Description of Artificial Sequence: Synthetic oligonucleotide
atcagcgcttacaatggtaacaca

SEQ ID NO: 1984 - DNA, 24 bp, Artificial Sequence
  Description of Artificial Sequence: Synthetic oligonucleotide
atatcatatgatggaagtattaaa

SEQ ID NO: 1985 - DNA, 24 bp, Artificial Sequence
  Description of Artificial Sequence: Synthetic oligonucleotide
atctcatatgatggaagttacaca

SEQ ID NO: 1986 - DNA, 24 bp, Artificial Sequence
  Description of Artificial Sequence: Synthetic oligonucleotide
acatcatatgatggacgtattaaa

SEQ ID NO: 1987 - DNA, 24 bp, Artificial Sequence
  Description of Artificial Sequence: Synthetic oligonucleotide
atcaaccctaacagtggtggcaca

SEQ ID NO: 1988 - DNA, 21 bp, Artificial Sequence
  Description of Artificial Sequence: Synthetic oligonucleotide
atccaccacagtggggccacc

SEQ ID NO: 1989 - DNA, 21 bp, Artificial Sequence
  Description of Artificial Sequence: Synthetic oligonucleotide
atccatcacagtggggccacc

SEQ ID NO: 1990 - DNA, 24 bp, Artificial Sequence
  Description of Artificial Sequence: Synthetic oligonucleotide
atcgaccctaacagtggtggcaca

SEQ ID NO: 1991 - DNA, 24 bp, Artificial Sequence
  Description of Artificial Sequence: Synthetic oligonucleotide
attatccctatccttggtacacca

SEQ ID NO: 1992 - DNA, 24 bp, Artificial Sequence
  Description of Artificial Sequence: Synthetic oligonucleotide
atatcatatggtggaagtaataaa

SEQ ID NO: 1993 - DNA, 27 bp, Artificial Sequence
  Description of Artificial Sequence: Synthetic oligonucleotide
acatattacaggtccaagtggtacaac

SEQ ID NO: 1994 - DNA, 24 bp, Artificial Sequence
  Description of Artificial Sequence: Synthetic oligonucleotide
attgattggaatagtggtgtcata

SEQ ID NO: 1995 - DNA, 24 bp, Artificial Sequence
  Description of Artificial Sequence: Synthetic oligonucleotide
atcaaccctgacagtggtgtcata

SEQ ID NO: 1996 - DNA, 21 bp, Artificial Sequence
  Description of Artificial Sequence: Synthetic oligonucleotide
atttattggaatgatgataag

SEQ ID NO: 1997 - DNA, 21 bp, Artificial Sequence
  Description of Artificial Sequence: Synthetic oligonucleotide
attgattgggatgatgataaa

SEQ ID NO: 1998 - DNA, 24 bp, Artificial Sequence
  Description of Artificial Sequence: Synthetic oligonucleotide
atctttcctggtgactctgacacc

SEQ ID NO: 1999 - DNA, 24 bp, Artificial Sequence
  Description of Artificial Sequence: Synthetic oligonucleotide
ataaagcaagatggaagtgagaaa

SEQ ID NO: 2000 - DNA, 24 bp, Artificial Sequence
  Description of Artificial Sequence: Synthetic oligonucleotide
atcagcgcttacaatggtaacaca

SEQ ID NO: 2001 - DNA, 24 bp, Artificial Sequence
  Description of Artificial Sequence: Synthetic oligonucleotide
atcagcggttacaatggtaacaca

SEQ ID NO: 2002 - DNA, 24 bp, Artificial Sequence
  Description of Artificial Sequence: Synthetic oligonucleotide
atcagcacttacaatggtaacaca

SEQ ID NO: 2003 - DNA, 21 bp, Artificial Sequence
  Description of Artificial Sequence: Synthetic oligonucleotide
attcattgggatgatgataag

SEQ ID NO: 2004 - DNA, 21 bp, Artificial Sequence
  Description of Artificial Sequence: Synthetic oligonucleotide
attgattgggataatgatcga

SEQ ID NO: 2005 - DNA, 24 bp, Artificial Sequence
  Description of Artificial Sequence: Synthetic oligonucleotide
attagtagtagtagtagtgacaca

SEQ ID NO: 2006 - DNA, 24 bp, Artificial Sequence
  Description of Artificial Sequence: Synthetic oligonucleotide
atatcatatgatggaagtctcaaa

SEQ ID NO: 2007 - DNA, 24 bp, Artificial Sequence
  Description of Artificial Sequence: Synthetic oligonucleotide
attagtagtaatgggggtagcaca

SEQ ID NO: 2008 - DNA, 24 bp, Artificial Sequence
  Description of Artificial Sequence: Synthetic oligonucleotide
ataaaccaagatggaagtgagaaa

SEQ ID NO: 2009 - DNA, 24 bp, Artificial Sequence
  Description of Artificial Sequence: Synthetic oligonucleotide
attgattggaatagtggtgtcata

SEQ ID NO: 2010 - DNA, 24 bp, Artificial Sequence
  Description of Artificial Sequence: Synthetic oligonucleotide
attagttggaatagtggtagcata

SEQ ID NO: 2011 - DNA, 21 bp, Artificial Sequence
  Description of Artificial Sequence: Synthetic oligonucleotide
atctatcatagtgggagcacc

SEQ ID NO: 2012 - DNA, 21 bp, Artificial Sequence
  Description of Artificial Sequence: Synthetic oligonucleotide
acctcttacagtggcaattcc

SEQ ID NO: 2013 - DNA, 21 bp, Artificial Sequence
  Description of Artificial Sequence: Synthetic oligonucleotide
atccttcccggtggggccacc

SEQ ID NO: 2014 - DNA, 21 bp, Artificial Sequence
  Description of Artificial Sequence: Synthetic oligonucleotide
atccaccacagtggggccacc

SEQ ID NO: 2015 - DNA, 21 bp, Artificial Sequence
  Description of Artificial Sequence: Synthetic oligonucleotide
atccaccacagtggggccacc

SEQ ID NO: 2016 - DNA, 21 bp, Artificial Sequence
  Description of Artificial Sequence: Synthetic oligonucleotide
atccaccacagtggggccacc

SEQ ID NO: 2017 - DNA, 24 bp, Artificial Sequence
  Description of Artificial Sequence: Synthetic oligonucleotide
atctatcctggtgactctgatacc

SEQ ID NO: 2018 - DNA, 24 bp, Artificial Sequence
  Description of Artificial Sequence: Synthetic oligonucleotide
atctatccttatgactctgatacc

SEQ ID NO: 2019 - DNA, 24 bp, Artificial Sequence
  Description of Artificial Sequence: Synthetic oligonucleotide
atctatcctggtgactctgatacc

SEQ ID NO: 2020 - DNA, 24 bp, Artificial Sequence
  Description of Artificial Sequence: Synthetic oligonucleotide
atctatcctggtgactctgatacc

SEQ ID NO: 2021 - DNA, 27 bp, Artificial Sequence
  Description of Artificial Sequence: Synthetic oligonucleotide
acatactacagttccaagtggtataat

SEQ ID NO: 2022 - DNA, 27 bp, Artificial Sequence
  Description of Artificial Sequence: Synthetic oligonucleotide
gcgagagggggtagcagctttgatatc

SEQ ID NO: 2023 - DNA, 27 bp, Artificial Sequence
  Description of Artificial Sequence: Synthetic oligonucleotide
gcgagggggtggcagtggcatgactac

SEQ ID NO: 2024 - DNA, 33 bp, Artificial Sequence
  Description of Artificial Sequence: Synthetic oligonucleotide
gcgagagatgtggggttcggatggttcgaccgc

SEQ ID NO: 2025 - DNA, 30 bp, Artificial Sequence
  Description of Artificial Sequence: Synthetic oligonucleotide
gtaagaaatatgaggcccgactttgacctc

SEQ ID NO: 2026 - DNA, 60 bp, Artificial Sequence
  Description of Artificial Sequence: Synthetic oligonucleotide
gcgagagccgccaattactatgatagtagtggttatggacgggctgatgcttttgatatc

SEQ ID NO: 2027 - DNA, 99 bp, Artificial Sequence
  Description of Artificial Sequence: Synthetic oligonucleotide
gcgagagatattcttccttccaattttgacgggaaaaaaattattgtcttccaaccacctgctaaaagggacctcgacaactactacggtatggacgtc

SEQ ID NO: 2028 - DNA, 36 bp, Artificial Sequence
  Description of Artificial Sequence: Synthetic oligonucleotide
gcgagagatttccacttgtactacggtatggacgtc

SEQ ID NO: 2029 - DNA, 42 bp, Artificial Sequence
  Description of Artificial Sequence: Synthetic oligonucleotide
gcgagagtaggtgacagttcctcctactacggaatagacgcc

SEQ ID NO: 2030 - DNA, 33 bp, Artificial Sequence
  Description of Artificial Sequence: Synthetic oligonucleotide
gcgagggactgggtgaacttcggtatggacgtc

SEQ ID NO: 2031 - DNA, 42 bp, Artificial Sequence
  Description of Artificial Sequence: Synthetic oligonucleotide
gcgagagatcccgggtggctacgatccgtcggtatggacgtc

SEQ ID NO: 2032 - DNA, 30 bp, Artificial Sequence
  Description of Artificial Sequence: Synthetic oligonucleotide
gcgagagggtcgggtggttattatttaggc

SEQ ID NO: 2033 - DNA, 27 bp, Artificial Sequence
  Description of Artificial Sequence: Synthetic oligonucleotide
gcgagaggacctggcatactgtcatac

SEQ ID NO: 2034 - DNA, 27 bp, Artificial Sequence
  Description of Artificial Sequence: Synthetic oligonucleotide
gcgagaggacctgggatactgtcatac

SEQ ID NO: 2035 - DNA, 45 bp, Artificial Sequence
  Description of Artificial Sequence: Synthetic oligonucleotide
gcgagagatcggggtcgggggggccaagcgggggcttttgactac

SEQ ID NO: 2036 - DNA, 36 bp, Artificial Sequence
  Description of Artificial Sequence: Synthetic oligonucleotide
gcggttggaagtggctggtactcaggttttgactac

SEQ ID NO: 2037 - DNA, 48 bp, Artificial Sequence
  Description of Artificial Sequence: Synthetic oligonucleotide
gcgaaagtgcggggcagtggctggtactggggtagtgcttttgatatc

SEQ ID NO: 2038 - DNA, 57 bp, Artificial Sequence
  Description of Artificial Sequence: Synthetic oligonucleotide
gcacgagaaatagtggctacaacaccgttccgcaactactactacggtatggacgtc

SEQ ID NO: 2039 - DNA, 45 bp, Artificial Sequence
  Description of Artificial Sequence: Synthetic oligonucleotide
gcaaaagatgcatacagctatggttttttgggtgcttttgatatc

SEQ ID NO: 2040 - DNA, 42 bp, Artificial Sequence
  Description of Artificial Sequence: Synthetic oligonucleotide
gcgcgagacaaagccattggctatgtgtgggctcttgactac

SEQ ID NO: 2041 - DNA, 42 bp, Artificial Sequence
  Description of Artificial Sequence: Synthetic oligonucleotide
gcacggatcagcggtagtggttatttctatccgtttgatatc

SEQ ID NO: 2042 - DNA, 33 bp, Artificial Sequence
  Description of Artificial Sequence: Synthetic oligonucleotide
gcacggtcgggtttactttatgacctcgacgtc

SEQ ID NO: 2043 - DNA, 30 bp, Artificial Sequence
  Description of Artificial Sequence: Synthetic oligonucleotide
gcgagggagtcatataatgcttacgggtca

SEQ ID NO: 2044 - DNA, 36 bp, Artificial Sequence
  Description of Artificial Sequence: Synthetic oligonucleotide
gcgagagggttttattactatggtgcttttgatatc

SEQ ID NO: 2045 - DNA, 33 bp, Artificial Sequence
  Description of Artificial Sequence: Synthetic oligonucleotide
gcgagaggatttccccagttagggtctgactac

SEQ ID NO: 2046 - DNA, 60 bp, Artificial Sequence
  Description of Artificial Sequence: Synthetic oligonucleotide
gcgagacagatgaaagatagtgggaactactgggaatactactactacggtatggacgtc

SEQ ID NO: 2047 - DNA, 30 bp, Artificial Sequence
  Description of Artificial Sequence: Synthetic oligonucleotide
gcgagagatgtgttcgggcacttcgactac

SEQ ID NO: 2048 - DNA, 42 bp, Artificial Sequence
  Description of Artificial Sequence: Synthetic oligonucleotide
gcgtccttcataatgaccgtctacgctgagtacttcgaggac

SEQ ID NO: 2049 - DNA, 63 bp, Artificial Sequence
  Description of Artificial Sequence: Synthetic oligonucleotide
gcacacagtccctatgattccatttgggggagttttcgcccgtctgtctattactttgactac

SEQ ID NO: 2050 - DNA, 27 bp, Artificial Sequence
  Description of Artificial Sequence: Synthetic oligonucleotide
gcgatgcccacccgtgaaccggcttac

SEQ ID NO: 2051 - DNA, 39 bp, Artificial Sequence
  Description of Artificial Sequence: Synthetic oligonucleotide
gcgagagagggggttagtaatagcaggccttttgaccac

SEQ ID NO: 2052 - DNA, 42 bp, Artificial Sequence
  Description of Artificial Sequence: Synthetic oligonucleotide
acgagagatctttggagtggttctgctgatagctttgatatt

SEQ ID NO: 2053 - DNA, 30 bp, Artificial Sequence
  Description of Artificial Sequence: Synthetic oligonucleotide
gcgagattgtattggtggggtatggacgtc

SEQ ID NO: 2054 - DNA, 45 bp, Artificial Sequence; identical to SEQ ID NO: 2039
  Description of Artificial Sequence: Synthetic oligonucleotide

SEQ ID NO: 2055 - DNA, 30 bp, Artificial Sequence
  Description of Artificial Sequence: Synthetic oligonucleotide
gcgagagattggtggggatccattgaccac

SEQ ID NO: 2056 - DNA, 42 bp, Artificial Sequence
  Description of Artificial Sequence: Synthetic oligonucleotide
gcgaggcgtggcgggacctatcaccgaggtgcttttgatatc

SEQ ID NO: 2057 - DNA, 36 bp, Artificial Sequence
  Description of Artificial Sequence: Synthetic oligonucleotide
gcgaggagggagtggataaagggacactttgactac

SEQ ID NO: 2058 - DNA, 27 bp, Artificial Sequence
  Description of Artificial Sequence: Synthetic oligonucleotide
gcgagaggacctgggatactgtcatac

SEQ ID NO: 2059 - DNA, 27 bp, Artificial Sequence
  Description of Artificial Sequence: Synthetic oligonucleotide
gcgagaggacctggcatactgtcatac

SEQ ID NO: 2060 - DNA, 27 bp, Artificial Sequence
  Description of Artificial Sequence: Synthetic oligonucleotide
gcgagaggacctggcatactgtcatac

SEQ ID NO: 2061 - DNA, 27 bp, Artificial Sequence
  Description of Artificial Sequence: Synthetic oligonucleotide
gggagaggacctggcatactgtcatac

SEQ ID NO: 2062 - DNA, 33 bp, Artificial Sequence
  Description of Artificial Sequence: Synthetic oligonucleotide
gcgagacaaggggacggtggggggtatgactac

SEQ ID NO: 2063 - DNA, 33 bp, Artificial Sequence
  Description of Artificial Sequence: Synthetic oligonucleotide
gcgagacagggctcgtcgcaatcttttgatatc

SEQ ID NO: 2064 - DNA, 36 bp, Artificial Sequence
  Description of Artificial Sequence: Synthetic oligonucleotide
gcgagacgtcgtgggtcagcggctgcatttgacacc

SEQ ID NO: 2065 - DNA, 36 bp, Artificial Sequence
  Description of Artificial Sequence: Synthetic oligonucleotide
gcgaggaccacatacagctatggctcttttgactac

SEQ ID NO: 2066 - DNA, 33 bp, Artificial Sequence
  Description of Artificial Sequence: Synthetic oligonucleotide
gcaagagggtggctacgattgtcctttgacccc

SEQ ID NO: 2067 - DNA, 349 bp, Artificial Sequence
  Description of Artificial Sequence: Synthetic polynucleotide
caggtgcagctggtgcagtctgggggaggcgtggtccagcctgggaagtccctgagactctcctgtacagcctctggattcaccttcagtgactttcctatacactgggtccgccaggctccaggcaaggggctggagtgggtgggagttatatcatacgatggaaatattaaatactacggagactccgtgaagggccgattcaccatctccagagacaacgccaagaactcactatatctgcaaatgaacagcctgagagtcgaggacacggctgtgtattactgtgcgagagggggtagcagctttgatatctggggccaagggaccacggtcaccgtctcctcag

SEQ ID NO: 2068 - DNA, 349 bp, Artificial Sequence
  Description of Artificial Sequence: Synthetic polynucleotide
caggtgcagctggtgcaatctggagcagaggtgaaaaagcccggggagtctctgaagatctcctgtaagggttctggatacagctttaccagctactggatcggctgggtgcgccagatgcccgggaaaggcctggagtggatggggatcatctatcctggtgactctgataccagatacagcccgtccttccaaggccaggtcaccatctcagccgacaagtccatcagcaccgcctacctgcagtggagcagcctgaaggcctcggacaccgccatgtattactgtgcgagggggtggcagtggcatgactactggggccagggaaccctggtcaccgtctcctcag

SEQ ID NO: 2069 - DNA, 352 bp, Artificial Sequence
  Description of Artificial Sequence: Synthetic polynucleotide
gaggtgcagctggtggagtctggcccaggactggtgaagccttcggagaccctgtccctcacctgcactgtctctggtggctccatcagtagttattactggagctggatccggcagcccgccgggaagggactggagtggattgggcgtatctataccagtgggagcaccaactacaacccctccctcaagagtcgagtcaccatgtcagtagacacgtccaagaaccagttctccctgaagctgagctctgtgaccgccgcggacacggccgtgtattactgtgcgagagatgtggggttcggatggttcgaccgctggggccagggcaccctggtcaccgtctcctcag

SEQ ID NO: 2070 - DNA, 361 bp, Artificial Sequence
  Description of Artificial Sequence: Synthetic polynucleotide
caggtacagctgtagcagtcaggtccaggactggtgaaggcctcgcagaccctctcactcacctgtgtcatctccggcgacagtgtctccagtagaagttctgcctggagctggatcaggcagtccccatcgagaggccttgagtggctggcaaggacatactacaggtccaactggaattatgattttgcacaatctgtgcgaagtcggatagtcatcaacccagacacatccaagaaccacgtgtaccttcagttgaggtccgtgactcccgaggacacggctgtctactattgtgtaagaaatatgaggcccgactttgacctctggggccagggcaccctggtcaccgtctcctcag

SEQ ID NO: 2071 - DNA, 382 bp, Artificial Sequence
  Description of Artificial Sequence: Synthetic polynucleotide
caggtgcagctggtgcagtctgggggaggcgtagtccagcctgggaggtccctgagactttcctgtgctgcgtctggattcacctttagtcactatgacatgcactgggtccgccaggctccaggcaaggggctggagtggttggcagttataggctatgatggaactaatctatactatgcagactccgtgaagggccgattcaccatctccagagacaaatccaagaacacgctgtatctgcaaataaacagcctgagagccgaggacacggctgtgtattactgtgcgagagccgccaattactatgatagtagtggttatggacgggctgatgcttttgatatctggggccaagggaccacggtcaccgtctcctcag

SEQ ID NO: 2072 - DNA, 420 bp, Artificial Sequence
  Description of Artificial Sequence: Synthetic polynucleotide
caggtgcagctggtgcagtctgggggaggcttggtacagcctggcaggtccctgagactctcctgtgcagcctctggattcacctttgatgattatgccatgcactgggtccggcaagttccagggaagggcctggagtgggtctcaggtattgattggaatagtggtgtcatagggtatgcggactctgtgaagggccgattcaccatctccagagacaatgtcaagaactccctgtatctgcagatgaccagcctgagagccgaggacacggctgtttatttctgtgcgagagatattcttccttccaattttgacgggaaaaaaattattgtcttccaaccacctgctaaaagggacctcgacaactactacggtatggacgtctggggccaagggaccacggtcaccgtctcctca

SEQ ID NO: 2073 - DNA, 358 bp, Artificial Sequence
  Description of Artificial Sequence: Synthetic polynucleotide
gaggtgcagctggtgcagtctggggctgaggtgaagaagcctgggtcctcggtgaaggtctcctgcaagacttctggttacacctttaccacctctggtatcagttgggtgcgacaggcccctggacaaggacttgaatggatgggatggatcagcgcttacaatggtaacacaaactatgcacagaagctccagggcagagtcaccatgaccacagacacatccacgagcacagcctacatggagctgaggagcctgagatctgacgacacggccgtgtattactgtgcgagagatttccacttgtactacggtatggacgtctggggcaaaggcaccctggtcaccgtctcctcag

SEQ ID NO: 2074 - DNA, 363 bp, Artificial Sequence
  Description of Artificial Sequence: Synthetic polynucleotide
caggtgcagctggtgcaatctgggggaggcgtggtccagcctgggaggtccctaagactgtcctgtgcagcctctggattcaccttcactacgtatggcatgcactgggtccgccaggctccaggcaaggggctggagtgggtggcagttatatcatatgatggaagtattaaaaactatgcagacttcgtggagggccgcttcaccatctccagagacaattccaagaacacgctgtatctgcaaatgaacagcctgagacccgaggacacgggtgtgtactactgtgcgagagtaggtgacagttcctcctactacggaatagacgcctggggccaaggaaccctggtcaccgtctcctca

SEQ ID NO: 2075 - DNA, 354 bp, Artificial Sequence
  Description of Artificial Sequence: Synthetic polynucleotide
caggtgcagctggtgcagtctgggggaggcttggtacagccagggcggtccctgagactctcctgtgcagcctctggattcaccttcagtagtcatgctatgcactgggtccgccaggctccaggcaaggggctagagtgggtggctgccatctcatatgatggaagttacacaccgtacgcagactccgtgaagggccgattcaccatctccagagacaatgccaagaactcactgtatctgcaaatgaacagcctgagagacgaggacacggctgtgtattactgtgcgagggactgggtgaacttcggtatggacgtctggggccaaggcaccctggtcaccgtctcctca

SEQ ID NO: 2076 - DNA, 363 bp, Artificial Sequence
  Description of Artificial Sequence: Synthetic polynucleotide
caggtgcagctggtgcagtctgggggaggcgtggtccagcctgggaggtccctgagactctcctgtgcagcctctggattcaccttcagtgattatccttttcactgggtccgccaggctccgggcaaggggctgcagtgggtggctgtcacatcatatgatggacgtattaaactttacgcagactccgtgaagggccgattcaccatctcccgggacgactcccagaatatgctgtatctggaaatgcacagcctgagacttgaagacacggctgtctattactgtgcgagagatcccgggtggctacgatccgtcggtatggacgtctggggccaagggaccacggtcaccgtctcctca

SEQ ID NO: 2077 - DNA, 352 bp, Artificial Sequence
  Description of Artificial Sequence: Synthetic polynucleotide
caggtgcagctggtgcagtctggggctgaggtgaagaagcctgggtcctcggtgaaggtctcctgcaaggcttctggaggcaccttcagcagctatgctatcagctggctgcgacaggcccctggacaagggcttgagtggatgggatggatcaaccctaacagtggtggcacaaactatgcacagaagtttcagggcagggtcaccatgaccagggacacgtccatcagcacagcctacatggagctgagcaggctgagatctgacgacacggccgtgtattactgtgcgagagggtcgggtggttattatttaggctggggccagggaaccctggtcaccgtctcctcag

SEQ ID NO: 2078 - DNA, 346 bp, Artificial Sequence
  Description of Artificial Sequence: Synthetic polynucleotide
gaggtgcagctggtggagtctggcccaggagtggtgagcccttcggcgaccctattcctcacctgcagtgtctctggtggctccatcagaactcactcctggaactggatccggcagccgccagggaagccactggaatggattgggtttatccaccacagtggggccaccaataagaacccgtccctcaagagccgggtcaccatatcctcagacacgtccaagaacgagttctccctgacgttgacctctgtgaccgctgcggacacggccgtctactactgtgcgagaggacctggcatactgtcatactggagccggggcaccctggtcaccgtctcctcag

SEQ ID NO: 2079 - DNA, 346 bp, Artificial Sequence
  Description of Artificial Sequence: Synthetic polynucleotide
gaggtgcagctggtggagtctggcccaggactggtgaagccttcggcgaccctattcctcacctgcagtgtctctggtggctccatcagaactcactcctggaactggatccggtagccgccagggaagccactggagtggattgggtttatccatcacagtggggccaccaataagaacccgtccctcaagagccgggtcagcatatcctcagacccgtccaagaacgagttctccctgacgttgacctctgtgaccgctgcggacacggccgtctattactgtgcgagaggacctgggatactgtcatactggagtcggggaaccctggtcaccgtctcctcag

SEQ ID NO: 2080 - DNA, 367 bp, Artificial Sequence
  Description of Artificial Sequence: Synthetic polynucleotide
caggtgcagctggtgcagtctggggctgaggtgaagaagcctggggcctcagtgaagttctcctgcaaggcttctggatacaccttctccgactattatatacactgggtgcgacaggcccctggacaagggcttgagtggatgggatggatcgaccctaacagtggtggcacaaactttgcacagagatttcagggcagggtcaccatgaccacggacacgtccgtcagcacagcctacatggacctaaggaggctgagatctgacgacacggccgtgtattattgtgcgagagatcggggtcgggggggccaagcgggggcttttgactactggggccagggaaccctggtcaccgtctcctcag

SEQ ID NO: 2081 - DNA, 358 bp, Artificial Sequence
  Description of Artificial Sequence: Synthetic polynucleotide
caggtgcagctggtgcagtctggggctgaggtgaagaagcctgggtcctcggtgaaggtctcctgcaaggcttctggaggcaccttcagcagctatactatcagctgggtgcgacaggcccctggacaaggacttgagtggatgggagggattatccctatccttggtacaccaaattacgcacagaagttccaggacagagtcgcgattaccgcggacaaatccacgagcacagcctacatggagctgagcagcctgagatctgaggacacggccgtgtattactgtgcggttggaagtggctggtactcaggttttgactactggggccagggaaccctggtcaccgtctcctcag

SEQ ID NO: 2082 - DNA, 370 bp, Artificial Sequence
  Description of Artificial Sequence: Synthetic polynucleotide
caggtgcatctggtgcagtctgggggaggcgtggtccagcctgggaggtccctgagactctcctgtgcagcgtctggattcaccttcagtagctatgccatgcactgggtccgccaggctccaggcaaggggctggagtgggtggcacttatatcatatggtggaagtaataaatactatgcagagtccgtgaagggccgattcaccatctccagagacaattccaagaacaccctgtatctgcaaatgaacagcctgagagctgaggacacggctgtgtattactgtgcgaaagtgcggggcagtggctggtactggggtagtgcttttgatatctggggccaagggacaatggtcaccgtctcttcag

SEQ ID NO: 2083 - DNA, 387 bp, Artificial Sequence
  Description of Artificial Sequence: Synthetic polynucleotide
caggtacagctgcagcagtcaggtccaggactggtgaagccctcgcagaccctctcactcacctgtgccatctccggggacagtgtctctagctacagtgatgcttggaactggatcaggcagtccccatcgagaggccttgagtggctgggaaggacatattacaggtccaagtggtacaacgattatgcagtatctgtgaaaagtcgaataaccatcaacccggacacatccaagaaccagttctccctgcagctgagctctgtgactcccgaagacacggctgtctattactgtgcacgagaaatagtggctacaacaccgttccgcaactactactacggtatggacgtctggggccaagggaccacggtcaccgtctcctca

SEQ ID NO: 2084 - DNA, 367 bp, Artificial Sequence
  Description of Artificial Sequence: Synthetic polynucleotide
caggtgcagctggtgcagtctgggggaggcttggtacagcctggcaggtccctgagactctcctgtgcagcctctggattcacctttgatgattatgccatgcactgggtccggcaagttccagggaagggcctggagtgggtctcaggtattgattggaatagtggtgtcatagggtatgcggactctgtgaagggccgattcaccatctccagagacaacgccaagaactccctgtatctgcaaatgaacagtctgagagctgaggacacggccttgtattactgtgcaaaagatgcatacagctatggttttttgggtgcttttgatatctggggccaagggacaatggtcaccgtctcttcag

SEQ ID NO: 2085 - DNA, 364 bp, Artificial Sequence
  Description of Artificial Sequence: Synthetic polynucleotide
caggtgcagctggtgcagtctgggactgaggtgaagaagcctggggcctcagtgaaggtctcctgcaaggcttctggatacagcttcaccggctcccatctgcactgggtgcgacaggcccctggacaagggcttgagtggatgggatggatcaaccctgacagtggtgtcataaactatgcacagaagtttcagggcagggtcaccctgaccagggacacgtccatcagcacagcctacatggagctgagcgggctgagatctgacgacacggccgtgtattactgtgcgcgagacaaagccattggctatgtgtgggctcttgactactggggccagggcaccctggtcaccgtctcctcag

SEQ ID NO: 2086 - DNA, 367 bp, Artificial Sequence
  Description of Artificial Sequence: Synthetic polynucleotide
caggtcaccttgaaggagtctggtcctacgcgggtgaagcccacacagaccctcacgctgacctgcaccttctctggattctcactcagtactactggagtgggtgtgggctggatccgtcagcccccaggaaaggccctggaatggcttgccctcatttattggaatgatgataagcgctacagcccatctctgaagagcaggctcaccatcaccaaggacacctccaaaaaccaggtggtccttacaatgaccaacatggaccctgttgacacagccacgtattactgtgcacggatcagcggtagtggttatttctatccgtttgatatctggggccaagggaccacggtcaccgtctcctcag

SEQ ID NO: 2087 - DNA, 358 bp, Artificial Sequence
  Description of Artificial Sequence: Synthetic polynucleotide
caggtcaccttgaaggagtctggtcctacgctggtgaaacccacacagaccctcacactgacctgcaccttgtctggggtctcactcgacactattggaatgcgtgtgagctggatccgtcagcccccagggaaggccctggaatggcttgcacgcattgattgggatgatgataaattctacagcacagctctgaagaccaggctcaccatctccaaggacacctccaaaaaccaggtggtcttcacaatgaccagcatggaccctgtggacacagccacctactactgtgcacggtcgggtttactttatgacctcgacgtctggggccgtggcaccctggtcaccgtctcctcag

SEQ ID NO: 2088 - DNA, 352 bp, Artificial Sequence
  Description of Artificial Sequence: Synthetic polynucleotide
gaggtgcagctggtgcagtctggagcagaggtgaagaagccgggggagtctctgaggatctcctgtaaggcttctggatacagctttaccagcaactggatcggctgggtgcgccagatgcccgggaaaggcctggagtggatggggagcatctttcctggtgactctgacaccaaatacagcccgtccttccaaggccaggtcaccatctcagccgacaggtccatcagcaccgcctacctgcagtggagtggcctgaaggcctcggacaccgccatgtattactgtgcgagggagtcatataatgcttacgggtcatggggccagggaaccctggtcaccgtctcctcag

SEQ ID NO: 2089 - DNA, 358 bp, Artificial Sequence
  Description of Artificial Sequence: Synthetic polynucleotide
caggtgcagctggtgcagtctgggggaggcttggtccagcctggggggtccctgagactctcctgtgcagcctctggattcacctttagtagctattggatgagctgggtccgccaggctccagggaaggggctggagtgggtggccaacataaagcaagatggaagtgagaaatactatgtggactctgtgaagggccgattcaccatctccagagacaacgccaagaactcactgtatctgcaaatgaacagcctgagagccgaggacacggctgtgtattactgtgcgagagggttttattactatggtgcttttgatatctggggccaagggaccacggtcaccgtctcctcag

SEQ ID NO: 2090 - DNA, 355 bp, Artificial Sequence
  Description of Artificial Sequence: Synthetic polynucleotide
gaggtgcagctggtgcagtctggagctgaggtgaagaagcctggggcctcagtgaaggtctcctgcaaggcttctggttacacctttaccagctatggtatcagctgggtgcgacaggcccctggacaagggcttgagtggatgggatggatcagcgcttacaatggtaacacaaagtatgcacagaagctccagggcagagtcaccatgaccacagacacatccacgagcacagcctacatggagctgaggagcctgagatctgacgacacggccgtgtattactgtgcgagaggatttccccagttagggtctgactactggggccagggcaccctggtcaccgtctcctcag

SEQ ID NO: 2091 - DNA, 381 bp, Artificial Sequence
  Description of Artificial Sequence: Synthetic polynucleotide
gaggtgcagctggtgcagtctggggctgaggtggagaagcctgggtcctcggtgaaggtctcctgcaaggcttctggaggcaccttcagcagctatgctatcagctgggtgcgacaggcccctggacaaggacttgagtggatgggatggatcagcggttacaatggtaacacaaggtatgcacagaagttccagggcagagtcaccctgaccatagacacatcctcgagcacagcctacatggagctgagcagcctgagatctgaggacacggccgtgtattactgtgcgagacagatgaaagatagtgggaactactgggaatactactactacggtatggacgtctggggccaagggacaatggtcaccgtctcttca

SEQ ID NO: 2092 - DNA, 352 bp, Artificial Sequence
  Description of Artificial Sequence: Synthetic polynucleotide
caggtgcagctggtgcagtctggagctgaggtgaagaagcctggggcctcagtgaaggtctcctgcaaggcttctggttacacttttaccagctacggtatcagctgggtgcgacaggcccctggacaagggcttgagtggatgggatggatcagcacttacaatggtaacacaaactatgcacagaaactccagggcagagtcaccatgaccacagacacatccacgagcacagcctacatggaggtgaggagcctgagatctgacgacacggccgtgtattactgtgcgagagatgtgttcgggcacttcgactactggggccagggcaccctggtcaccgtctcctcag

SEQ ID NO: 2093 - DNA, 367 bp, Artificial Sequence
  Description of Artificial Sequence: Synthetic polynucleotide
caggtcaccttgaaggagtctggtcctacgctggtgaaacccacacagaccctcacgctgacctgcaccttctctgggttctcactcaccactactggagtgagtgtgggctggatccgtcagcccccaggaaaggccctggagtggcttgccctcattcattgggatgatgataagcgctacagcccatctctgaggagcaggctcaccatcacaagggacacctccaaaaaccaggtggtcctgacagtgaccgacatggaccctgcggacacaggcacatattactgtgcgtccttcataatgaccgtctacgctgagtacttcgaggactggggccagggcaccctggtcaccgtctcctcag

SEQ ID NO: 2094 - DNA, 388 bp, Artificial Sequence
  Description of Artificial Sequence: Synthetic polynucleotide
caggtcaccttgaaggagtctggtcctgcgctggtgaaatccacacagaccctcacactgacctgcaccatctctggattctcactcagcaccagtgcaatgtgtgtgagctggatccgtcagtccccagggaaggccctggagtggcttgcactcattgattgggataatgatcgatactacaccacatctctgaagaccaggctcaccatcaccaaggacacctccaaaaaccaagtggtccttaccatgaccagcatggacccactggacacggccacatattactgtgcacacagtccctatgattccatttgggggagttttcgcccgtctgtctattactttgactactggggccagggaaccctggtcaccgtctcctcag

SEQ ID NO: 2095 - DNA, 349 bp, Artificial Sequence
  Description of Artificial Sequence: Synthetic polynucleotide
caggtgcagctggtgcagtctgggggaggcttggtcaagcctggggggtccctgagactctcctgtgcagcctctggattcaccttcagtgactactacatgacctggttccgccaggctccagggaaggggctggagtggatttcatacattagtagtagtagtagtgacacaaagtacgcagactctgtgaagggccgattcaccatctccagagacaacgccaagaattcattgtatctgcaaatggacagcctgagagccgaggacacggctgtgtattactgtgcgatgcccacccgtgaaccggcttactggggccagggcaccctggtcaccgtctcctcag

SEQ ID NO: 2096 - DNA, 361 bp, Artificial Sequence
  Description of Artificial Sequence: Synthetic polynucleotide
caggtgcagctggtgcagtctgggggaggcgtggtccagcctgggaagtccctgaggctctcctgtgcggcctctggattcgccttcagtgactttcctgtgcactgggtccgccaggctccaggcaaggggctagagtgggtggcggttatatcatatgatggaagtctcaaatactatgcagactccgtgaagggccgattcaccctctccagagacaactccaagaacacggtgtatctgcaattgagcagcctgagaagagaggacacggctgtgtattactgtgcgagagagggggttagtaatagcaggccttttgaccactggggccacggaaccctggtcaccgtctcctcag

SEQ ID NO: 2097 - DNA, 364 bp, Artificial Sequence
  Description of Artificial Sequence: Synthetic polynucleotide
caggtgcagctggtgcagtctgggggaggcgtggtccagcctgggaggtccctgagactctcctgtgcagcctctggattcaccttcagtagctatgctatgcactgggtccgccaggctccagggaagggactggaatatgtttcagctattagtagtaatgggggtagcacatactacgcagactctgtgaagggccgattcaccatctccagagacaacggcaagaactcactgtatctgcaaatgagcagcctgagagccgaggacacggctgtgtattactgtacgagagatctttggagtggttctgctgatagctttgatatttggggccaagggacaatggtcaccgtctcttcag

SEQ ID NO: 2098 - DNA, 351 bp, Artificial Sequence
  Description of Artificial Sequence: Synthetic polynucleotide
caggtgcagctggtgcagtctgggggaggcttggtccagcctggggggtccctgagactctcctgtgcagcctctggattcccctttaatgcctattacatgagctgggtccgccaggctccagggaaggggctggagtgggtggccaacataaaccaagatggaagtgagaaatactatgtggactctgtgaagggccgattcaccatctccagagacaacgccaagaactcactgtatctgcaaatgaacggcctgagagccgaggacacggctgtgtattactgtgcgagattgtattggtggggtatggacgtctggggccaagggaccacggtcaccgtctcctca

SEQ ID NO: 2099 - DNA, 367 bp, Artificial Sequence; identical to SEQ ID NO: 2084
  Description of Artificial Sequence: Synthetic polynucleotide

SEQ ID NO: 2100 - DNA, 352 bp, Artificial Sequence
  Description of Artificial Sequence: Synthetic polynucleotide
caggtgcagctggtgcagtctgggggaggcttggtacagcctggggggtccctgagactctcctgtgcaacctctggattcacctttgatgattatgccatgcactgggtccggcaagctccagggaagggcctggagtgggtctcaggtattagttggaatagtggtagcataggctatgtggactctgtgaagggccgattcaccatctccagagacaaccgcaataacaaggtctatctgcaaatgaacaatctgagagccgaggacacggctgtctattactgtgcgagagattggtggggatccattgaccactggggcctgggaaccctggtcaccgtctcctcag

SEQ ID NO: 2101 - DNA, 364 bp, Artificial Sequence
  Description of Artificial Sequence: Synthetic polynucleotide
gaggtgcagctggtggagtctggcccaggactggtgaagccttcggggaccctgtccctcacctgcgctgtctctggtggctccatcagcagtagtaactggtggagttgggtccgccagcccccagggaaggggctggagtggattggggaaatctatcatagtgggagcaccaactacaacccgtccctcaagagtcgagtcaccatatcagtagacacgtccaagaaccagttctccctgaagctgagttctgtgaccgctgcggacacggccgtatattactgtgcgaggcgtggcgggacctatcaccgaggtgcttttgatatctggggccaagggacaatggtcaccgtctcttcag

SEQ ID NO: 2102 - DNA, 355 bp, Artificial Sequence
  Description of Artificial Sequence: Synthetic polynucleotide
caggtcaccttgaaggagtctggccctggactggtgaacccttcggagaccctgtcgctcacctgcactgtctctggtgcctccatcagtaattctttctggagttggatccggcagtccccagggaagggactggagtggattgggtatacctcttacagtggcaattccatctacaacccctccctcaagagccgactcaccatgtcgatagacacgtccaagaaccagttgtccctgaacctgaggtctttgaccgctgcggacacggccgtgtattactgtgcgaggagggagtggataaagggacactttgactactggggccagggcaccctggtcaccgtctcctcag

SEQ ID NO: 2103 - DNA, 346 bp, Artificial Sequence
  Description of Artificial Sequence: Synthetic polynucleotide
gaggtgcagctggtggagtctggaccaggactgatgaagccttcggagaccctattcctctcctgcagtgtttctggaggctccttcacaactcactcctggaactggatccggcagacgcccgggaagccactggagtggatggggattatccttcccggtggggccaccaataaaaacccgcccctcttgagccgggtcagcatatcctcagacccgtccaacaacgagttctccctgacgttgacctctgtgaccgctgcggacacggccgtctattactgtgcgagaggacctgggatactgtcatactggagtgggggaaccctggccaccgtctcctcag

SEQ ID NO: 2104 - DNA, 346 bp, Artificial Sequence
  Description of Artificial Sequence: Synthetic polynucleotide
gaggtgcagctggtggagtctggcccaggattggtgagcccttcggcgaccctattcctcacctgcagtgtctctggaggctccttcagaactcactcctggaactggatccggcaggcgccagggaagccactggaatggatgggtgttatccaccacagtggggccaccaataagaacccgtccctcaagagccgggtcaccatatcctcagaaacgtccgacaacaagttctccctgacgttgacctctgtgaccgctgaggacacggccgtctactactgtgcgagaggacctggcatactgtcatactggagccggggcaccctgggcaccgtctcctcag

SEQ ID NO: 2105 - DNA, 346 bp, Artificial Sequence
  Description of Artificial Sequence: Synthetic polynucleotide
gaggtgcagctggtggagtctggcccaggagtggtgagcccttcggcgaccctattcctcacctgcagtgtctctggtggctccatcagaactcactcctggaactggatccggcagccgccagggaagccactggaatggattggggttatccaccacagtggggccaccaataagaacccgtccctcaagagccgggtcaccatatcctcaaaaacgtccgacaacaagttctccctgacgttgacctctgtgaccgctgaggacacggccgtctactactgtgcgagaggacctggcatactgtcatactggagccggggcaccctgggcaccgtctcctcag

SEQ ID NO: 2106 - DNA, 346 bp, Artificial Sequence
  Description of Artificial Sequence: Synthetic polynucleotide
gaggtgcagctggtggagtctggcccaggagtggtgagcccttcggcgaccctattcctcacctgcagtgtctctggtggctccatcagaactcactcctggaactggatccggcaggcgccagggaaggcactggaatggattgggtttatccaccacagtggggccaccaataacaacccgtccctcaagagccgggtcaccatatcctcagacacgtccaagaacgagttctccctgacgttgacctctgtgaccgctgcggacacggccgtctactactgtgggagaggacctggcatactgtcatactggagccggggcaccctggtcaccgtctcctcag

SEQ ID NO: 2107 - DNA, 355 bp, Artificial Sequence
  Description of Artificial Sequence: Synthetic polynucleotide
caggtgcagctggtgcagtctggagcagaggtgaaaaagcccggggagtctctgaagatctcctgtaagggttctggatacagctttaccagctactggatcggctgggtgcgccagatgcccgggaaaggcctggagtggatggggatcatctatcctggtgactctgataccagatacagcccgtccttccaaggccaggtcaccatctcagccgacaagtccatcagcaccgcctacctgcagtggagcagcctgaaggcctcggacaccgccatgtattactgtgcgagacaaggggacggtggggggtatgactactggggccaagggacaatggtcaccgtctcttcag

SEQ ID NO: 2108 - DNA, 355 bp, Artificial Sequence
  Description of Artificial Sequence: Synthetic polynucleotide
caggtgcagctggtgcagtctggagcagaggtgaaaaagcccgggaattctctgaagatctcctgtaagggttctagatacagctttagcaactactggatcgcctgggtgcgccagatgcccgggaaaggcctggagtggctgggatccatctatccttatgactctgataccagatacagtccgtccctccaaggccaagtcaccatctcagtcgacaagtccctcagcaccgcctacctgcagtggagaagcctgaaggcctcggacaccgccatgtattactgtgcgagacagggctcgtcgcaatcttttgatatctggggccaagggaccacggtcaccgtctcctcag

SEQ ID NO: 2109 - DNA, 358 bp, Artificial Sequence
  Description of Artificial Sequence: Synthetic polynucleotide
gaggtgcagctggtgcagtctggagcagaggtgaaaaagcccggggagtctctgaagatctcctgtaagggttctggatacagctttaccagctactggatcggctgggtgcgccagatgcccgggaaaggcctggagtggatggggatcatctatcctggtgactctgataccagatacagcccgtccttccaaggccaggtcaccatctcagccgacaagtccatcagcaccgcctacctgcagtggagcagcctgaaggcctcggacaccgccatgtattactgtgcgagacgtcgtgggtcagcggctgcatttgacacctggggccagggaaccctggtcaccgtctcctcag

SEQ ID NO: 2110 - DNA, 358 bp, Artificial Sequence
  Description of Artificial Sequence: Synthetic polynucleotide
caggtgcagctggtgcagtctggagtagaggtgaaaaagcccggggagtctctgaagatctcctgtaagggttctggatacagctttaccagctactggatcggctgggtgcgccagatgcccgggaaaggcctggagtggatggggatcatctatcctggtgactctgataccagatacagcccgtccttccaaggccaggtcaccatctcagccgacaagtccatcagcaccgcctacctgcagtggagcagcctgaaggcctcggacaccgccatgtattattgtgcgaggaccacatacagctatggctcttttgactactggggccagggcaccctggtcaccgtctcctcag

SEQ ID NO: 2111 - DNA, 364 bp, Artificial Sequence
  Description of Artificial Sequence: Synthetic polynucleotide
caggtacagctgcagcagtcaggtccaggactggtgaagccctcgcagaccctctcactcacctgtgccatcttcggggacagtgttactagcaacagtgctgcttggaattggatcaggcagtccccatcgagaggccttgagtggctgggaaggacatactacagttccaagtggtataatgattatgcagtatctgtgaaaagtcgagtaaccatcaacgcagacacatccaagaaccagttgtccctgcagctgaactctgtgactcccgaggacacggctgtgtattactgtgcaagagggtggctacgattgtcctttgacccctggggccagggaaccctggtcaccgtctcctcag

SEQ ID NO: 2112 - DNA, 24 bp, Artificial Sequence
  Description of Artificial Sequence: Synthetic oligonucleotide
acctccaacatcggaaataatgct

SEQ ID NO: 2113 - DNA, 18 bp, Artificial Sequence
  Description of Artificial Sequence: Synthetic oligonucleotide
agcctcagaagctattat

SEQ ID NO: 2114 - DNA, 24 bp, Artificial Sequence
  Description of Artificial Sequence: Synthetic oligonucleotide
agtggcagcattgccagcaactat

SEQ ID NO: 2115 - DNA, 18 bp, Artificial Sequence
  Description of Artificial Sequence: Synthetic oligonucleotide
cagagtgttagcaacaac

SEQ ID NO: 2116 - DNA, 24 bp, Artificial Sequence
  Description of Artificial Sequence: Synthetic oligonucleotide
actggcagcattgccggcaactat

SEQ ID NO: 2117 - DNA, 27 bp, Artificial Sequence
  Description of Artificial Sequence: Synthetic oligonucleotide
agcagtgatgttggtggttataacctt

SEQ ID NO: 2118 - DNA, 27 bp, Artificial Sequence
  Description of Artificial Sequence: Synthetic oligonucleotide
agcagtgacgttggtgcttataactat

SEQ ID NO: 2119 - DNA, 24 bp, Artificial Sequence
  Description of Artificial Sequence: Synthetic oligonucleotide
agctccaacatcggaagtaatagt

SEQ ID NO: 2120 - DNA, 27 bp, Artificial Sequence
  Description of Artificial Sequence: Synthetic oligonucleotide
agcagtgacgttggtggttataactat

SEQ ID NO: 2121 - DNA, 24 bp, Artificial Sequence
  Description of Artificial Sequence: Synthetic oligonucleotide
agtggcagcattgcccgcaactat

SEQ ID NO: 2122 - DNA, 24 bp, Artificial Sequence
  Description of Artificial Sequence: Synthetic oligonucleotide
agcaacaatgttggcaaccaagga

SEQ ID NO: 2123 - DNA, 24 bp, Artificial Sequence
  Description of Artificial Sequence: Synthetic oligonucleotide
agctccaacatcggaagtaatact

SEQ ID NO: 2124 - DNA, 24 bp, Artificial Sequence
  Description of Artificial Sequence: Synthetic oligonucleotide
agctccaacatcggaagtaatgat

SEQ ID NO: 2125 - DNA, 18 bp, Artificial Sequence
  Description of Artificial Sequence: Synthetic oligonucleotide
aaaattggaagtaaaagt

SEQ ID NO: 2126 - DNA, 24 bp, Artificial Sequence
  Description of Artificial Sequence: Synthetic oligonucleotide
agtggcagcattgccagcaactat

SEQ ID NO: 2127 - DNA, 18 bp, Artificial Sequence
  Description of Artificial Sequence: Synthetic oligonucleotide
agcctcagagcctatttt

SEQ ID NO: 2128 - DNA, 24 bp, Artificial Sequence
  Description of Artificial Sequence: Synthetic oligonucleotide
agtggcagcattgccagcaactat

SEQ ID NO: 2129 - DNA, 18 bp, Artificial Sequence
  Description of Artificial Sequence: Synthetic oligonucleotide
aacattgggagtaaaagt

SEQ ID NO: 2130 - DNA, 27 bp, Artificial Sequence
  Description of Artificial Sequence: Synthetic oligonucleotide
agcagtgacgttggtacttataaccgt

SEQ ID NO: 2131 - DNA, 24 bp, Artificial Sequence
  Description of Artificial Sequence: Synthetic oligonucleotide
agtggcagcattgccagcaactat

SEQ ID NO: 2132 - DNA, 24 bp, Artificial Sequence
  Description of Artificial Sequence: Synthetic oligonucleotide
gactccgacatcggggcaaatttt

SEQ ID NO: 2133 - DNA, 24 bp, Artificial Sequence
  Description of Artificial Sequence: Synthetic oligonucleotide
agctccaacatcggaagtaaccct

SEQ ID NO: 2134 - DNA, 24 bp, Artificial Sequence
  Description of Artificial Sequence: Synthetic oligonucleotide
agtggcagcattgccagcaactat

SEQ ID NO: 2135 - DNA, 24 bp, Artificial Sequence
  Description of Artificial Sequence: Synthetic oligonucleotide
agtggcagcattgccagcaactat

SEQ ID NO: 2136 - DNA, 18 bp, Artificial Sequence
  Description of Artificial Sequence: Synthetic oligonucleotide
aacattggaagtgaaagt

SEQ ID NO: 2137 - DNA, 24 bp, Artificial Sequence
  Description of Artificial Sequence: Synthetic oligonucleotide
agcggcaacattgccaccaactat

SEQ ID NO: 2138 - DNA, 18 bp, Artificial Sequence
  Description of Artificial Sequence: Synthetic oligonucleotide
cagagtgttagcagcaac

SEQ ID NO: 2139 - DNA, 24 bp, Artificial Sequence
  Description of Artificial Sequence: Synthetic oligonucleotide
agtggcagcattgtcagcagctat

SEQ ID NO: 2140 - DNA, 27 bp, Artificial Sequence
  Description of Artificial Sequence: Synthetic oligonucleotide
agcagtgaccttggtacttataactat

SEQ ID NO: 2141 - DNA, 18 bp, Artificial Sequence
  Description of Artificial Sequence: Synthetic oligonucleotide
agcattggaaccaaaagt

SEQ ID NO: 2142 - DNA, 18 bp, Artificial Sequence
  Description of Artificial Sequence: Synthetic oligonucleotide
agtctcagaaggtattat

SEQ ID NO: 2143 - DNA, 27 bp, Artificial Sequence
  Description of Artificial Sequence: Synthetic oligonucleotide
agcagtgacgttggtggttataagtat

SEQ ID NO: 2144 - DNA, 18 bp, Artificial Sequence
  Description of Artificial Sequence: Synthetic oligonucleotide
aatattcggactaaaggc

SEQ ID NO: 2145 - DNA, 27 bp, Artificial Sequence
  Description of Artificial Sequence: Synthetic oligonucleotide
agcagtgacgttggtggttatgactat

SEQ ID NO: 2146 - DNA, 27 bp, Artificial Sequence
  Description of Artificial Sequence: Synthetic oligonucleotide
agccgtgatgttgggagttatgacctt

SEQ ID NO: 2147 - DNA, 24 bp, Artificial Sequence
  Description of Artificial Sequence: Synthetic oligonucleotide
ggtggcagcattgccagcaactat

SEQ ID NO: 2148 - DNA, 23 bp, Artificial Sequence
  Description of Artificial Sequence: Synthetic oligonucleotide
agctccgcatcggaagtaatgat

SEQ ID NO: 2149 - DNA, 24 bp, Artificial Sequence
  Description of Artificial Sequence: Synthetic oligonucleotide
agctccaacatcggaagtaatact

SEQ ID NO: 2150 - DNA, 24 bp, Artificial Sequence
  Description of Artificial Sequence: Synthetic oligonucleotide
agctccaacatcggaagtaatact

SEQ ID NO: 2151 - DNA, 24 bp, Artificial Sequence
  Description of Artificial Sequence: Synthetic oligonucleotide
agctccaacatcggaagtaatact

SEQ ID NO: 2152 - DNA, 24 bp, Artificial Sequence
  Description of Artificial Sequence: Synthetic oligonucleotide
agctccaacatcggaagtaatcct

SEQ ID NO: 2153 - DNA, 18 bp, Artificial Sequence
  Description of Artificial Sequence: Synthetic oligonucleotide
agcctcagaagctattat

SEQ ID NO: 2154 - DNA, 24 bp, Artificial Sequence
  Description of Artificial Sequence: Synthetic oligonucleotide
agctccaacatcggaagtaatcct

SEQ ID NO: 2155 - DNA, 24 bp, Artificial Sequence
  Description of Artificial Sequence: Synthetic oligonucleotide
agctccaacatcggcggtaattct

SEQ ID NO: 2156 - DNA, 24 bp, Artificial Sequence
  Description of Artificial Sequence: Synthetic oligonucleotide
agtggcagcattgccagcaactat

SEQ ID NO: 2157 - DNA, 9 bp, Artificial Sequence
  Description of Artificial Sequence: Synthetic oligonucleotide
tataatgaa

SEQ ID NO: 2158 - DNA, 9 bp, Artificial Sequence
  Description of Artificial Sequence: Synthetic oligonucleotide
gataaagac

SEQ ID NO: 2159 - DNA, 9 bp, Artificial Sequence
  Description of Artificial Sequence: Synthetic oligonucleotide
gaggataac

SEQ ID NO: 2160 - DNA, 9 bp, Artificial Sequence
  Description of Artificial Sequence: Synthetic oligonucleotide
gatgcgacc

SEQ ID NO: 2161 - DNA, 9 bp, Artificial Sequence
  Description of Artificial Sequence: Synthetic oligonucleotide
gatgataat

SEQ ID NO: 2162 - DNA, 9 bp, Artificial Sequence
  Description of Artificial Sequence: Synthetic oligonucleotide
gagggcagt

SEQ ID NO: 2163 - DNA, 9 bp, Artificial Sequence
  Description of Artificial Sequence: Synthetic oligonucleotide
gacgtcact

SEQ ID NO: 2164 - DNA, 9 bp, Artificial Sequence
  Description of Artificial Sequence: Synthetic oligonucleotide
agtaataat

SEQ ID NO: 2165 - DNA, 9 bp, Artificial Sequence
  Description of Artificial Sequence: Synthetic oligonucleotide
gaggtcagt

SEQ ID NO: 2166 - DNA, 9 bp, Artificial Sequence
  Description of Artificial Sequence: Synthetic oligonucleotide
gcggatagg

SEQ ID NO: 2167 - DNA, 9 bp, Artificial Sequence
  Description of Artificial Sequence: Synthetic oligonucleotide
atgaataac

SEQ ID NO: 2168 - DNA, 9 bp, Artificial Sequence
  Description of Artificial Sequence: Synthetic oligonucleotide
agtaataat

SEQ ID NO: 2169 - DNA, 9 bp, Artificial Sequence
  Description of Artificial Sequence: Synthetic oligonucleotide
agtaacaat

SEQ ID NO: 2170 - DNA, 9 bp, Artificial Sequence
  Description of Artificial Sequence: Synthetic oligonucleotide
gatgatagc

SEQ ID NO: 2171 - DNA, 9 bp, Artificial Sequence
  Description of Artificial Sequence: Synthetic oligonucleotide
gaggatagt

SEQ ID NO: 2172 - DNA, 9 bp, Artificial Sequence
  Description of Artificial Sequence: Synthetic oligonucleotide
ggtcaagac

SEQ ID NO: 2173 - DNA, 9 bp, Artificial Sequence
  Description of Artificial Sequence: Synthetic oligonucleotide
caagataaa

SEQ ID NO: 2174 - DNA, 9 bp, Artificial Sequence
  Description of Artificial Sequence: Synthetic oligonucleotide
gaagatagg

SEQ ID NO: 2175 - DNA, 9 bp, Artificial Sequence
  Description of Artificial Sequence: Synthetic oligonucleotide
gaggtcagt

SEQ ID NO: 2176 - DNA, 9 bp, Artificial Sequence
  Description of Artificial Sequence: Synthetic oligonucleotide
gaggataac

SEQ ID NO: 2177 - DNA, 9 bp, Artificial Sequence
  Description of Artificial Sequence: Synthetic oligonucleotide
cgtaacacc

SEQ ID NO: 2178 - DNA, 9 bp, Artificial Sequence
  Description of Artificial Sequence: Synthetic oligonucleotide
agtaataat

SEQ ID NO: 2179 - DNA, 9 bp, Artificial Sequence
  Description of Artificial Sequence: Synthetic oligonucleotide
gaggataac

SEQ ID NO: 2180 - DNA, 9 bp, Artificial Sequence
  Description of Artificial Sequence: Synthetic oligonucleotide
gaggataac

SEQ ID NO: 2181 - DNA, 9 bp, Artificial Sequence
  Description of Artificial Sequence: Synthetic oligonucleotide
gaggatagg

SEQ ID NO: 2182 - DNA, 9 bp, Artificial Sequence
  Description of Artificial Sequence: Synthetic oligonucleotide
gaggataac

SEQ ID NO: 2183 - DNA, 9 bp, Artificial Sequence
  Description of Artificial Sequence: Synthetic oligonucleotide
gatgtatcc

SEQ ID NO: 2184 - DNA, 9 bp, Artificial Sequence
  Description of Artificial Sequence: Synthetic oligonucleotide
gaacataat

SEQ ID NO: 2185 - DNA, 9 bp, Artificial Sequence
  Description of Artificial Sequence: Synthetic oligonucleotide
gatgtcttt

SEQ ID NO: 2186 - DNA, 9 bp, Artificial Sequence
  Description of Artificial Sequence: Synthetic oligonucleotide
gatgatgac

SEQ ID NO: 2187 - DNA, 9 bp, Artificial Sequence
  Description of Artificial Sequence: Synthetic oligonucleotide
ggtaaaaac

SEQ ID NO: 2188 - DNA, 9 bp, Artificial Sequence
  Description of Artificial Sequence: Synthetic oligonucleotide
gatgtcaat

SEQ ID NO: 2189 - DNA, 9 bp, Artificial Sequence
  Description of Artificial Sequence: Synthetic oligonucleotide
tatgctagc

SEQ ID NO: 2190 - DNA, 9 bp, Artificial Sequence
  Description of Artificial Sequence: Synthetic oligonucleotide
gatgtcagt

SEQ ID NO: 2191 - DNA, 9 bp, Artificial Sequence
  Description of Artificial Sequence: Synthetic oligonucleotide
gagggcagt

SEQ ID NO: 2192 - DNA, 9 bp, Artificial Sequence
  Description of Artificial Sequence: Synthetic oligonucleotide
gaggataac

SEQ ID NO: 2193 - DNA, 9 bp, Artificial Sequence
  Description of Artificial Sequence: Synthetic oligonucleotide
agtaacaat

SEQ ID NO: 2194 - DNA, 9 bp, Artificial Sequence
  Description of Artificial Sequence: Synthetic oligonucleotide
atcaataat

SEQ ID NO: 2195 - DNA, 9 bp, Artificial Sequence
  Description of Artificial Sequence: Synthetic oligonucleotide
atcaataat

SEQ ID NO: 2196 - DNA, 9 bp, Artificial Sequence
  Description of Artificial Sequence: Synthetic oligonucleotide
agtaataat

SEQ ID NO: 2197 - DNA, 9 bp, Artificial Sequence
  Description of Artificial Sequence: Synthetic oligonucleotide
aataataat

SEQ ID NO: 2198 - DNA, 9 bp, Artificial Sequence
  Description of Artificial Sequence: Synthetic oligonucleotide
ggtaaaaac

SEQ ID NO: 2199 - DNA, 9 bp, Artificial Sequence
  Description of Artificial Sequence: Synthetic oligonucleotide
gataataat

SEQ ID NO: 2200 - DNA, 9 bp, Artificial Sequence
  Description of Artificial Sequence: Synthetic oligonucleotide
aggaataat

SEQ ID NO: 2201 - DNA, 9 bp, Artificial Sequence
  Description of Artificial Sequence: Synthetic oligonucleotide
gaggataat

SEQ ID NO: 2202 - DNA, 36 bp, Artificial Sequence
  Description of Artificial Sequence: Synthetic oligonucleotide
gcagcatgggatgacagcctgagtggtcatgtggta

SEQ ID NO: 2203 - DNA, 33 bp, Artificial Sequence
  Description of Artificial Sequence: Synthetic oligonucleotide
aactcccgggacagaagtgataaccatgtggta

SEQ ID NO: 2204 - DNA, 30 bp, Artificial Sequence
  Description of Artificial Sequence: Synthetic oligonucleotide
cagtcttttgatagcgccagtctttgggtg

SEQ ID NO: 2205 - DNA, 24 bp, Artificial Sequence
  Description of Artificial Sequence: Synthetic oligonucleotide
caacagtatgataatctccccgtt

SEQ ID NO: 2206 - DNA, 30 bp, Artificial Sequence
  Description of Artificial Sequence: Synthetic oligonucleotide
cagtcttatgatagcggcaaccggggagtc

SEQ ID NO: 2207 - DNA, 30 bp, Artificial Sequence
  Description of Artificial Sequence: Synthetic oligonucleotide
agctcatatacaatcaccgacgtcgtggtc

SEQ ID NO: 2208 - DNA, 36 bp, Artificial Sequence
  Description of Artificial Sequence: Synthetic oligonucleotide
gcagtatgggatgacggcctgaatggtcgggtggta

SEQ ID NO: 2209 - DNA, 33 bp, Artificial Sequence
  Description of Artificial Sequence: Synthetic oligonucleotide
gcagcatgggatgacagcctgactggttatgtc

SEQ ID NO: 2210 - DNA, 33 bp, Artificial Sequence
  Description of Artificial Sequence: Synthetic oligonucleotide
gcagcatgggatgacagcctgagtggtccggta

SEQ ID NO: 2211 - DNA, 33 bp, Artificial Sequence
  Description of Artificial Sequence: Synthetic oligonucleotide
cagtcttatgatagcagcaatcaagctgctgtg

SEQ ID NO: 2212 - DNA, 33 bp, Artificial Sequence
  Description of Artificial Sequence: Synthetic oligonucleotide
tcagcatgggacagcagcctcagtcgttgggtg

SEQ ID NO: 2213 - DNA, 36 bp, Artificial Sequence
  Description of Artificial Sequence: Synthetic oligonucleotide
gcagcgtgggatgacagcctgaatgtccactatgtc

SEQ ID NO: 2214 - DNA, 33 bp, Artificial Sequence
  Description of Artificial Sequence: Synthetic oligonucleotide
gcaacatgggatgacagcctgagtgccggggta

SEQ ID NO: 2215 - DNA, 33 bp, Artificial Sequence
  Description of Artificial Sequence: Synthetic oligonucleotide
cacgtgtgggatagtagtagtgaccaaaatgtc

SEQ ID NO: 2216 - DNA, 30 bp, Artificial Sequence
  Description of Artificial Sequence: Synthetic oligonucleotide
cagtcttttcataacagcaatcctgtgatt

SEQ ID NO: 2217 - DNA, 33 bp, Artificial Sequence
  Description of Artificial Sequence: Synthetic oligonucleotide
aattcccgggacagcggtgaaaaccatcttatt

SEQ ID NO: 2218 - DNA, 30 bp, Artificial Sequence
  Description of Artificial Sequence: Synthetic oligonucleotide
cagtcttatgatagcagcagtctctgggtg

SEQ ID NO: 2219 - DNA, 33 bp, Artificial Sequence
  Description of Artificial Sequence: Synthetic oligonucleotide
caagtgtgggatggtgatagtgatcattatgtc

SEQ ID NO: 2220 - DNA, 30 bp, Artificial Sequence
  Description of Artificial Sequence: Synthetic oligonucleotide
agctcatatacaaggaccttcacttatgtc

SEQ ID NO: 2221 - DNA, 30 bp, Artificial Sequence
  Description of Artificial Sequence: Synthetic oligonucleotide
cagtcttatgatagcagcagcctttgggtg

SEQ ID NO: 2222 - DNA, 33 bp, Artificial Sequence
  Description of Artificial Sequence: Synthetic oligonucleotide
cagtcctatgacagcagccttagtgcttatgtc

SEQ ID NO: 2223 - DNA, 33 bp, Artificial Sequence
  Description of Artificial Sequence: Synthetic oligonucleotide
gcagcatgggatgacagcctgagtggagtggta

SEQ ID NO: 2224 - DNA, 30 bp, Artificial Sequence
  Description of Artificial Sequence: Synthetic oligonucleotide
cagtcttatgatagcagcaatcattgggtg

SEQ ID NO: 2225 - DNA, 27 bp, Artificial Sequence
  Description of Artificial Sequence: Synthetic oligonucleotide
cagtcttatgatagcaccaattgggtg

SEQ ID NO: 2226 - DNA, 36 bp, Artificial Sequence
  Description of Artificial Sequence: Synthetic oligonucleotide
caggtgtggaatcctagtggctctcttcaatatgtc

SEQ ID NO: 2227 - DNA, 27 bp, Artificial Sequence
  Description of Artificial Sequence: Synthetic oligonucleotide
aagtcttatgatgacggcaatcatgtc

SEQ ID NO: 2228 - DNA, 27 bp, Artificial Sequence
  Description of Artificial Sequence: Synthetic oligonucleotide
caacagcgtggagtctggcccctcact

SEQ ID NO: 2229 - DNA, 27 bp, Artificial Sequence
  Description of Artificial Sequence: Synthetic oligonucleotide
cagtcttatgatagtcagaatggggtg

SEQ ID NO: 2230 - DNA, 30 bp, Artificial Sequence
  Description of Artificial Sequence: Synthetic oligonucleotide
agctcatatacaagcagcagcacttatgtc

SEQ ID NO: 2231 - DNA, 33 bp, Artificial Sequence
  Description of Artificial Sequence: Synthetic oligonucleotide
caggtgtgggaaagtgatgatgatgatcttgtg

SEQ ID NO: 2232 - DNA, 39 bp, Artificial Sequence
  Description of Artificial Sequence: Synthetic oligonucleotide
aactcccgggacatcagcgataaccagtggcagtggata

SEQ ID NO: 2233 - DNA, 33 bp, Artificial Sequence
  Description of Artificial Sequence: Synthetic oligonucleotide
agctcgtatacaggcaggatgaatctctatgtc

SEQ ID NO: 2234 - DNA, 33 bp, Artificial Sequence
  Description of Artificial Sequence: Synthetic oligonucleotide
caggtgtgggatagtagtagtgatcttgtggta

SEQ ID NO: 2235 - DNA, 30 bp, Artificial Sequence
  Description of Artificial Sequence: Synthetic oligonucleotide
agctcatatacaagcagcagcccggtggta

SEQ ID NO: 2236 - DNA, 30 bp, Artificial Sequence
  Description of Artificial Sequence: Synthetic oligonucleotide
agctcatatacaagcagtaatagtctcgtc

SEQ ID NO: 2237 - DNA, 30 bp, Artificial Sequence
  Description of Artificial Sequence: Synthetic oligonucleotide
cagtcttatgatagcagcaaccctgtggta

SEQ ID NO: 2238 - DNA, 32 bp, Artificial Sequence
  Description of Artificial Sequence: Synthetic oligonucleotide
gctgatgggatgacagcctgagtgccgtggta

SEQ ID NO: 2239 - DNA, 36 bp, Artificial Sequence
  Description of Artificial Sequence: Synthetic oligonucleotide
gcagagtggtatgacagcctgaatgtccactatgtc

SEQ ID NO: 2240 - DNA, 36 bp, Artificial Sequence
  Description of Artificial Sequence: Synthetic oligonucleotide
gcagagtgctatgacagcctgaatgaccactatgtc

SEQ ID NO: 2241 - DNA, 36 bp, Artificial Sequence; identical to SEQ ID NO: 2213
  Description of Artificial Sequence: Synthetic oligonucleotide

SEQ ID NO: 2242 - DNA, 30 bp, Artificial Sequence
  Description of Artificial Sequence: Synthetic oligonucleotide
gcggcatgggatgacagtctgaatggttta

SEQ ID NO: 2243 - DNA, 33 bp, Artificial Sequence
  Description of Artificial Sequence: Synthetic oligonucleotide
aattcccgggacagcagtggtgacgtacgagtg

SEQ ID NO: 2244 - DNA, 33 bp, Artificial Sequence
  Description of Artificial Sequence: Synthetic oligonucleotide
gaagcatgggatgacagcctgagtggtccggtg

SEQ ID NO: 2245 - DNA, 33 bp, Artificial Sequence
  Description of Artificial Sequence: Synthetic oligonucleotide
gcagcatgggatgacagcctgaatggctgggtg

SEQ ID NO: 2246 - DNA, 33 bp, Artificial Sequence
  Description of Artificial Sequence: Synthetic oligonucleotide
cagtcttatgatcccaacaatcatggggtggta

SEQ ID NO: 2247 - DNA, 334 bp, Artificial Sequence
  Description of Artificial Sequence: Synthetic polynucleotide
tcctatgagctgactcagccaccctcggtctctgaagcccccaggcagagggtcaccatctcctgttctggaagcacctccaacatcggaaataatgctgtaagctggtaccaacacctcccaggaaaggctcccaaactcctcatctattataatgaacggttgccctcaggggtctctgaccgattctctggctccaagtctggcacctcagcctccctggccatcagtgggctccggtccgaggatgaggctgattattactgtgcagcatgggatgacagcctgagtggtcatgtggtattcggcggagggaccaagctgaccgtcctag

SEQ ID NO: 2248 - DNA, 325 bp, Artificial Sequence
  Description of Artificial Sequence: Synthetic polynucleotide
cagactgtggtgactcaggagcctgctgtgtctgtggccttgggacagacagtcaggatcacatgccaaggagacagcctcagaagctattatgcaagctggtaccaacaaaagccaggacaggcccctgtacttgtcgtctatgataaagacaagcggccctcagggatcccagaccgattctctggctccacctcaggaaacacagcttccttgaccatcactggggctcaggcggaagatgaggctgactattactgtaactcccgggacagaagtgataaccatgtggtattcggcggagggaccaagctgaccgtcctag

SEQ ID NO: 2249 - DNA, 334 bp, Artificial Sequence
  Description of Artificial Sequence: Synthetic polynucleotide
aattttatgctgactcagccccactctgtgtcggagtctccggggaagacggtaaccatctcctgcacccgcagcagtggcagcattgccagcaactatgtgcagtggtaccagcagcgcccgggcagttcccccaccactgtgatctatgaggataaccaaagaccctctggggtccctgatcggttctctggctccatcgacagctcctccaactctgcctccctcaccatctctggactgacgactgaggacgaggctgactactactgtcagtcttttgatagcgccagtctttgggtgttcggcggagggaccaagctgaccgtcctag

SEQ ID NO: 2250 - DNA, 319 bp, Artificial Sequence
  Description of Artificial Sequence: Synthetic polynucleotide
gaaattgtgttgacgcagtctccagccaccctgtctttgtctccaggggaaagagccaccctctcctgcagggccagtcagagtgttagcaacaacctagcctggtaccagcagaggcctggccaggctcccaggctcctcatttatgatgcgaccaccagggccactgctatcccagccaggttcagtggcagcgggtctgggacagagttcactctcaccatcagcaggctggagcctgaagattttgcaacatattactgtcaacagtatgataatctccccgttttcggcggagggaccaaggtggagatcaacg

SEQ ID NO: 2251 - DNA, 334 bp, Artificial Sequence
  Description of Artificial Sequence: Synthetic polynucleotide
aattttatgctgactcagccccactctgtgtcggagtctccggggaagacggtaatcatctcctgcacccgcaccactggcagcattgccggcaactatgtgcagtggtatcggcagcggccgggcagtgcccccaccactgtgatctatgatgataatcaacgacccgctggggtccctgatcggttctctggctccgtcgacagctcctccaactctgcctccctcaccatcactggactgaagactgaggacgaggctgactattattgtcagtcttatgatagcggcaaccggggagtcttcggaactgggaccaaactcaccgtcctat

SEQ ID NO: 2252 - DNA, 331 bp, Artificial Sequence
  Description of Artificial Sequence: Synthetic polynucleotide
cagcctgggctgactcagcctgcctccgtgtctgggtctcctggacagtcagtcaccatctcctgcactggaaccagcagtgatgttggtggttataaccttgtctcctggtaccaacagcacccaggcaaggcccccaaactcatgatttatgagggcagtaagcggccctcagggatttctaatcgcttctctggctccaagtctggcaacacggcctccctgacaatctctgggctccaggctgaggacgaggctgattatttctgcagctcatatacaatcaccgacgtcgtggtcttcggcggagggaccaagctgaccgtcctag

SEQ ID NO: 2253 - DNA, 337 bp, Artificial Sequence
  Description of Artificial Sequence: Synthetic polynucleotide
cagtctgccctgactcagcctccctccgcgtccgggtctcctggacagtcagtcaccatctcctgcactggaaccagcagtgacgttggtgcttataactatgtctcctggtaccaacagcacccaggcaaagcccccaaactcctgatctatgacgtcactaagcggcccccaggggtccctgatcgcttctctggctccaagtctggcaacacggcctccctgaccgtctctgggctccaggctgaggatgaggctgattattactgtgcagtatgggatgacggcctgaatggtcgggtggtattcggcggagggaccaagctgaccgtcctag

SEQ ID NO: 2254 - DNA, 331 bp, Artificial Sequence
  Description of Artificial Sequence: Synthetic polynucleotide
cagcctgtgctgactcagccaccctcagcgtctgggacccccgggcagagggtcaccatctcttgttctggaagcagctccaacatcggaagtaatagtgtgaactggtaccagcagctcccaggaacggcccccaaactcctcatctatagtaataatcagcggccctcaggggtccctgaccgattctctgactccaagtctggcacctcagcctccctggccatcagtgggctccagtctgaggatgaggctgattatttctgtgcagcatgggatgacagcctgactggttatgtcttcggaactgggaccaaggtcaccgtcctag

SEQ ID NO: 2255 - DNA, 334 bp, Artificial Sequence
  Description of Artificial Sequence: Synthetic polynucleotide
cagtctgtgctgactcagccaccctccgcgtccgggtctcctggacagtcagtcaccatctcctgcactggaaccagcagtgacgttggtggttataactatgtctcctggtaccaacagtacccaggcaaagcccccaaactcatgatttatgaggtcagtaagcggccctcaggtgtccctgatcgcttctctggctccaagtctggcaacacggcctccctgaccgtctctgggctccgggctgaggatgaggctgattactactgtgcagcatgggatgacagcctgagtggtccggtattcggcggagggaccaagctgaccgtcctag

SEQ ID NO: 2256 - DNA, 337 bp, Artificial Sequence
  Description of Artificial Sequence: Synthetic polynucleotide
aattttatgctgactcagccccactctgtgtcggagtctccggggaagacagtaaccatctcctgcacccgcagcagtggcagcattgcccgcaactatgtgcagtggtatcagcagcgcccgggcagttcccccaccactgtgatctatgcggatagggacagaccctctggggtccctgatcggttctctggctccatcgacagctcctccaactctgcctccctcaccatctctggactgaagcctgaggacgaggctgactactactgtcagtcttatgatagcagcaatcaagctgctgtgttcggaggaggcacccagctgaccgtcctag

SEQ ID NO: 2257 - DNA, 331 bp, Artificial Sequence
  Description of Artificial Sequence: Synthetic polynucleotide
cagcctgggctgactcagccaccctcggtgtccaagggcttgagacagaccgccacactcacctgcactgggaacagcaacaatgttggcaaccaaggagcagcttggctgcagcagcaccagggccaccctcccaaactcctatcctacatgaataacaaccggcccccagggatctcagagagattctctgcatccaggtcaggaaacacagcctccctgaccattactggactccagcctgaggacgaggctgactattactgctcagcatgggacagcagcctcagtcgttgggtgttcggcggagggaccaagctgtccgtcctag

SEQ ID NO: 2258 - DNA, 334 bp, Artificial Sequence
  Description of Artificial Sequence: Synthetic polynucleotide
ctgcctgtgctgactcagccaccctcagcgtctgggacccccgggcagagggtcaccatctcttgttctggaagcagctccaacatcggaagtaatactgtaaactggtaccagcagctcccaggaacggcccccaaactcctcatctatagtaataatcagcggccctcaggggtccctgaccgattctctggctccaagtctggcacctcagcctccctggccatcagtgggctccagtctgaggatgaggctgattattactgtgcagcgtgggatgacagcctgaatgtccactatgtcttcggatctgggaccaaggtcaccgtcctac

SEQ ID NO: 2259 - DNA, 331 bp, Artificial Sequence
  Description of Artificial Sequence: Synthetic polynucleotide
cagcctgggctgactcagccaccctcagcgtctgggacccccgggcagagggtcaccatctcttgttctggaagcagctccaacatcggaagtaatgatgtcacctggtaccagcaactcccaggaacggcccccaaactcctcatctatagtaacaatcagcggccctcaggggtccctgaccgattctctgcctccaggtctggcacctcagcctccctggccatcactggcctccaggctgaggatgaggctgattattactgtgcaacatgggatgacagcctgagtgccggggtattcggcggagggaccaagctgaccgtcctag

SEQ ID NO: 2260 - DNA, 325 bp, Artificial Sequence
  Description of Artificial Sequence: Synthetic polynucleotide
cagcctgggctgactcagccaccctcggtgtcagtggccccaggaaagacggccaggattacctgtgggggaaacaaaattggaagtaaaagtgtgcactggtaccagcagaaggcaggccaggcccctgtgctggtcgtctatgatgatagcgaccggccctcggagatccctgagcgattctctggctccaactctgggaacacggccaccctgaccatcagcagggccgaagtcggggatgaggccgactattattgtcacgtgtgggatagtagtagtgaccaaaatgtcttcggaactgggaccaaggtcaccgtcctcc

SEQ ID NO: 2261 - DNA, 334 bp, Artificial Sequence
  Description of Artificial Sequence: Synthetic polynucleotide
aattttatgctgactcagccccactctgtgtcggagtctccggggaagacggtaaccatctcctgcaccggcagcagtggcagcattgccagcaactatgtgcagtggtaccagcagcgcccgggcagtgcccccaccactgtgatctatgaggatagtcaaagaccctctggggtccctgatcggttctctggctccatcgacagctcctccaactctgcctccctcaccatctctggcctgaagactgaggacgaggctgactactactgtcagtcttttcataacagcaatcctgtgattttcggcggagggaccaagctgaccgtcctag

SEQ ID NO: 2262 - DNA, 325 bp, Artificial Sequence
  Description of Artificial Sequence: Synthetic polynucleotide
tcttctgagctgactcaggaccctgctgtgtctgtggtcttggggcaggcagtcaggatcacatgccagggggacagcctcagagcctattttgcaggctggtaccaacagaagccaggacaggcccctgtccttgtcacctatggtcaagacaagaggccctcagggatcccagaccgattctctgcctccacctcaggaaacacagcttccttgaccatcaccggggctcaggcggacgatgaggctgactattactgtaattcccgggacagcggtgaaaaccatcttattttcggcggcgggaccaagctgaccgtcctag

SEQ ID NO: 2263 - DNA, 334 bp, Artificial Sequence
  Description of Artificial Sequence: Synthetic polynucleotide
aattttatgctgactcagccccactctgtgtcggagtctccggggaacacagtaaccatctcctgcacccgcaccagtggcagcattgccagcaactatgtgcagtggtaccagcagcgcccgggcagttcccccactactgtgatctttcaagataaattaagaccctctggggtccctgatcggttctctggctccatcgacagctcctccaattctgcctccctcaccatctctggactgaagactgaggacgaggctgactactactgtcagtcttatgatagcagcagtctctgggtgttcggcggagggaccaagctgaccgtcctag

SEQ ID NO: 2264 - DNA, 325 bp, Artificial Sequence
  Description of Artificial Sequence: Synthetic polynucleotide
cagcctgggctgactcagccaccctcggtgtcagtggccccaggacagacggccaggatttcctgcgggggaaacaacattgggagtaaaagtgtgcactggtaccagcagaagccaggccgggcccctgtgttggtcgtctatgaagataggggccggccctcagggatccctgagcgattctctggctccaactctgggaacacggccaccctgaccgtcagcagggtcgaagccggggatgaggccgactattactgtcaagtgtgggatggtgatagtgatcattatgtcttcgcaactgggaccaaggtctccatcctag

SEQ ID NO: 2265 - DNA, 331 bp, Artificial Sequence
  Description of Artificial Sequence: Synthetic polynucleotide
cagtctgccctgactcagcctccctccgtgtccgggtctcctggacagtcagtcaccatctcctgcactggaaccagcagtgacgttggtacttataaccgtgtctcctggtaccagcagcccccaggcaaagcccccaaactcatgatttatgaggtcagtaatcggccctcaggggtttctaatcgcttctctggctccaagtctggcaacacggcctccctgaccatctctgggctccaggctgaggacgaggctgattattactgcagctcatatacaaggaccttcacttatgtcttcggaactgggaccaaggtcaccgtcctag

SEQ ID NO: 2266 - DNA, 334 bp, Artificial Sequence
  Description of Artificial Sequence: Synthetic polynucleotide
aattttatgctgactcagccccactctgtgtcggagtctccggggaagacggtaaccatctcctgcacccgcagcagtggcagcattgccagcaactatgtgcagtggtaccagcagcgcccgggcagttcccccaccactgtgatctatgaggataaccaaagaccctctggggtccctgatcggttctctggctccatcgacagctcctccaactctgcctccctcaccatctctggactgaaggctgaggacgaggctgactactactgtcagtcttatgatagcagcagcctttgggtgttcggcggagggaccaagctgaccgtcctag

SEQ ID NO: 2267 - DNA, 331 bp, Artificial Sequence
  Description of Artificial Sequence: Synthetic polynucleotide
cagtctgtggtgactcagccaccgtcagtgtctggggcccccgggcagcgggtcaccatctcctgtactgggagcgactccgacatcggggcaaattttgtgcagtggtaccagcaactgccagggacagcccccaaactcctcatctggcgtaacaccaatcggccctcaggggtccctgaccgattctctgcctccaagtctggcacctcagcctccctggccatcactgggctccaggctgaggatgaggctgattatttctgccagtcctatgacagcagccttagtgcttatgtcttcggaggtgggaccaaggtcaccgtcctag

SEQ ID NO: 2268 - DNA, 331 bp, Artificial Sequence
  Description of Artificial Sequence: Synthetic polynucleotide
cagcctgggctgactcagccaccctcagcgtctgggacccccgggcagagggtcaccatttcttgttctggaagcagctccaacatcggaagtaaccctgtaaactggtaccagcagctcccaggaacggcccccaaactcctcatctatagtaataatcagcggccctcaggggtccctgaccgattctctggctccaagtctggcacctcagcctccctggccatcagtgggctccggtccgaggatgaggctgattattactgtgcagcatgggatgacagcctgagtggagtggtattcggcggagggaccaagctgaccgtcctag

SEQ ID NO: 2269 - DNA, 334 bp, Artificial Sequence
  Description of Artificial Sequence: Synthetic polynucleotide
aattttatgctgactcagccccactctgtgtcggagtctccggggaagacggtaaccatctcctgcaccggcagcagtggcagcattgccagcaactatgtgcagtggtaccagcagcgcccgggcagtgcccccaccactgtgatctatgaggataaccaaagaccctctggggtccctgatcggttctctggctccatcggcagctcctccaactctgcctccctcaccatctctggactgaagactgaggacgaggctgactactactgtcagtcttatgatagcagcaatcattgggtgttcggcggagggaccaagctgaccgtcctag

SEQ ID NO: 2270 - DNA, 331 bp, Artificial Sequence
  Description of Artificial Sequence: Synthetic polynucleotide
cagcctgtgctgactcagccgcactctgtgtcggagtctccggggaagacggtaaccatctcctgcacccgcagcagtggcagcattgccagcaactatgtgcagtggtaccagcagcgcccgggcagtgcccccaccactgtgatctatgaggataaccaaagaccctctggggtccctgatcggttctctggctccatcgacagctcctccaactctgcctccctcatcatctctggactgatgactgaggacgaggctgactactactgtcagtcttatgatagcaccaattgggtgttcggcggagggaccaagctgaccgtcctag

SEQ ID NO: 2271 - DNA, 328 bp, Artificial Sequence
  Description of Artificial Sequence: Synthetic polynucleotide
cagcctgggctgactcagccaccctcggtgtcagtggccccaggacagacggccacgattacctgtgggggagacaacattggaagtgaaagtgtgcactggtaccagcagaaggcaggccaggcccctgtgttggtcgtctatgaggataggggccggccctcagggatccctgagcgattctctggctccaactctgggaacacggccaccctgaccatcagcagggtcgaagccggggatgaggccgactattactgtcaggtgtggaatcctagtggctctcttcaatatgtcttcggacctgggaccaggctctccgtcctag

SEQ ID NO: 2272 - DNA, 331 bp, Artificial Sequence
  Description of Artificial Sequence: Synthetic polynucleotide
aattttatgctgactcagccccactctgtgtcggagtctccggggaagacggtcttaatctcctgcacccgcagtagcggcaacattgccaccaactatgtgcagtggtaccagcagcgcccgggcagtgcccccaccactgtgatctatgaggataaccaaagaccctctggggtccctgatcggttctctggctccatcgacagctcctccaactctgcctccctcaccatctctggactgaagactgaggacgaggctgactactactgtaagtcttatgatgacggcaatcatgtcttcggcggagggaccaagctgaccgtcctag

SEQ ID NO: 2273 - DNA, 322 bp, Artificial Sequence
  Description of Artificial Sequence: Synthetic polynucleotide
gaaattgtgttgacgcagtctccagccaccctgtctgtgtctccaggggaaagagccaccctctcctgcagggccagtcagagtgttagcagcaacttaccctggtaccagcagaaacctggccaggctcccaggctcctcatgtatgatgtatccaccagggccactggtatcccacccaggttcagtggcagtgggtctgggacagagttcagtctcaccatcagcagcctgcaatctgaagattttgcagtttattactgtcaacagcgtggagtctggcccctcactttcgacggagggaccaatgtagagatcaaac

SEQ ID NO: 2274 - DNA, 331 bp, Artificial Sequence
  Description of Artificial Sequence: Synthetic polynucleotide
aattttatgctgactcagccccactctgtgtcggagtctccggggaagacgataaccatctcctgcacccgcaccagtggcagcattgtcagcagctatgtgcagtggtaccagcagcgcccgggcagtttccccatcactgtgatctatgaacataatcagagaccctctggggtcccttatcggttctctgggtccatcgacaggtcctccaactctgccgccctcaccatctctgacctgaagactgaggacgaggctgactactactgtcagtcttatgatagtcagaatggggtgttcggcggggggaccaagctgaccgtccttg

SEQ ID NO: 2275 - DNA, 331 bp, Artificial Sequence
  Description of Artificial Sequence: Synthetic polynucleotide
cagtctgccctgactcagcctgcctccgtgtctgggtctcctggacagtcgatcaccatctcctgcactggaaccagcagtgaccttggtacttataactatgtctcctggtaccaacagcacccaggcaaagcccccaaactcatgatttatgatgtctttaagcggccctcaggggtccctgatcgcttctctggctccaagtctggcaacacggcctccctgaccatctctgggctccaggctgaggacgaggctgattattactgcagctcatatacaagcagcagcacttatgtcttcggaactgggaccaaggtcaccgtcctag

SEQ ID NO: 2276 - DNA, 325 bp, Artificial Sequence
  Description of Artificial Sequence: Synthetic polynucleotide
tcctatgagctgactcagccaccctcggtgtcagtggccccaggacagacggccaggattacctgtgggggagacagcattggaaccaaaagtgtgcattggtaccaacagaagtcaggccaggcccctgtgctggtcgtctatgatgatgacgaccggccctcagggatccctgagcgattctctggctccaactctgggaacacggccaccctgaccatcagcagggtcgaagccggggatgaggccgactattactgtcaggtgtgggaaagtgatgatgatgatcttgtgttcggcggagggaccaagctgaccgtcctag

SEQ ID NO: 2277 - DNA, 331 bp, Artificial Sequence
  Description of Artificial Sequence: Synthetic polynucleotide
tcttctgagctgactcaggaccctgctgtgtctgtggccttgggacagacagtcaagatcacatgccaaggagacagtctcagaaggtattatgccagctggtaccagcagaagccaggacaggcccctgtacgtgtcatctatggtaaaaacaaccggccctcagggatcccagaccgattctctggctccagctcaggaaacacagcttccttgaccatcactggggctcaggcagaagatgaggctgactattactgtaactcccgggacatcagcgataaccagtggcagtggatattcggcggagggaccaagctggccgtcctag

SEQ ID NO: 2278 - DNA, 334 bp, Artificial Sequence
  Description of Artificial Sequence: Synthetic polynucleotide
cagtctgccctgactcagcctccctccgcgtccgggtctcctggacagtcactcaccatctcctgcactgggaccagcagtgacgttggtggttataagtatgtctcctggtaccaacaccacccagacaaagcccccaaactcttgatttatgatgtcaataatcggccctcaggggtttctagtcgcttctctggctccaagtctggcaacacggcctccctgaccatctctgggctccaggctgaggacgaggctgactattactgcagctcgtatacaggcaggatgaatctctatgtctttggaactgggaccgaggtcacccccaggg

SEQ ID NO: 2279 - DNA, 325 bp, Artificial Sequence
  Description of Artificial Sequence: Synthetic polynucleotide
ctgcctgtgctgactcagccaccctcggtgtcagtggccccaggacagacggccagcattacctgtgggggagacaatattcggactaaaggcgtgcactggtaccaacagaagccaggccaggcccctctgctggtcatctattatgctagcgaccggccctcagggatccctgagcgattctctggctccagctctgggaacacggccaccctgaccatcagcagggtcgaagccggggatgaggccgactattactgtcaggtgtgggatagtagtagtgatcttgtggtattcggcggagggaccacgctgaccgtcctag

SEQ ID NO: 2280 - DNA, 331 bp, Artificial Sequence
  Description of Artificial Sequence: Synthetic polynucleotide
cagtctgccctgactcagcctcgctcagtgtccgggtctcctggacagtcagtcaccatctcctgcactggaaccagcagtgacgttggtggttatgactatgtctcctggtaccaacagcacccaggcaaagcccccaaactcatcatttatgatgtcagtaagcggccctcaggggtccctgatcgcttctctggctccaagtctggcaacacggcctccctgaccgtctctgggctccaggctgaagatgaggctgattattactgcagctcatatacaagcagcagcccggtggtattcggcggagggaccaagctgaccgtcctaa

SEQ ID NO: 2281 - DNA, 331 bp, Artificial Sequence
  Description of Artificial Sequence: Synthetic polynucleotide
cagtctgtgctgactcagccaccctccgcgtccgggtctcctggacagtcagtcaccatctcctgcactggaaccagccgtgatgttgggagttatgaccttgtctcctggtaccaacagcacccaggcaaagcccccaaactcatgatttatgagggcagtaggcgcccctcaggggtttctagtcgcttctctggctccaagtctggcaacacggcctccctgaccatctctgggctccaggctgaggacgaggctgattattactgcagctcatatacaagcagtaatagtctcgtcttcggaactgggaccaaggtcaccgtcctag

SEQ ID NO: 2282 - DNA, 334 bp, Artificial Sequence
  Description of Artificial Sequence: Synthetic polynucleotide
aattttatgctgactcagccccactctgtgtcggagtctccggggaagacggtgaccatctcctgcaccggcagcggtggcagcattgccagcaactatgtgcagtggtaccagcagcgcccgggcagtgcccccaccactgtgatctatgaggataaccaaagaccctctggggtccctgatcggttctctggctccatcgacagctcctccaactctgcctccctcaccatctctggactgaagactgaggacgaggctgactactactgtcagtcttatgatagcagcaaccctgtggtattcggcggagggaccaagctgaccgtcctag

SEQ ID NO: 2283 - DNA, 329 bp, Artificial Sequence
  Description of Artificial Sequence: Synthetic polynucleotide
cagcctgggctgactcagacaccctccccgtctgggacccccgggcagagggtcaccatctcttgttctggaagcagctccgcatcggaagtaatgatgtcacctggtaccagcaactcccaggaacggcccccaaactcctcatctatagtaacaatcagcggccctcaggggtccctgaccgattctctgcctccaggtctggcacctcaccctccctggccatcactggcctccaggctgaggatgaggctgattattactgtgctgatgggatgacagcctgagtgccgtggtattcggcggagggaccaagatgaccgtcctag

SEQ ID NO: 2284 - DNA, 334 bp, Artificial Sequence
  Description of Artificial Sequence: Synthetic polynucleotide
ctgcctgtgctgactcagccaccctcagcgtctgggacccccgggcagagggtcaccatctcttgttctggaagcagctccaacatcggaagtaatactgtaaactggtaccaccagctcccacgaacggcccccaaactcctcatctatatcaataatcatcggccctcaggggtccctgaccgattctctggctcctagtctggcacctcagcctccctggccatcaccgtgatccagtctgaggatgaggctgattattactgtgcagagtggtatgacagcctgaatgtccactatgtcttcggatctgggaccaaggtcaccgtcctac

SEQ ID NO: 2285 - DNA, 334 bp, Artificial Sequence
  Description of Artificial Sequence: Synthetic polynucleotide
ctgcctgtgctgactcagccaccctcagcgtctgggacccccgggcagagggtcaccatctcttgttctggaagcagctccaacatcggaagtaatactgtaaactggtaccactacctcccacgaacggcccccaaactcctcatctatatcaataatcatcgggcctcaagggtccctgaccgattctctggctcctagtctggcacctcagcctccctggccatcactgtgatccagtctgaggatgaggctgattattactgtgcagagtgctatgacagcctgaatgaccactatgtcttcggatctgggaccaaggtcaccgtcctac

SEQ ID NO: 2286 - DNA, 334 bp, Artificial Sequence
  Description of Artificial Sequence: Synthetic polynucleotide
ctgcctgtgctgactcagccaccctcagcgtctgggacccccgggcagagggtcaccatctcttgttctggaagcagctccaacatcggaagtaatactgtaaactggtaccagcagctcccaggaacggcccccaaactcctcatctatagtaataatcagcggccctcacgggtccctgaccgattctctggctccaagactggcacctcaccctccctggccatcagtgtgctccagtctgaggatgaggctgattattactgtgcagcgtgggatgacagcctgaatgtccactatgtcttcggatctgggaccaagtcaccgtcctacg

SEQ ID NO: 2287 - DNA, 328 bp, Artificial Sequence
  Description of Artificial Sequence: Synthetic polynucleotide
cagcctgtgctgactcagccaccctcagcgtctgggacccccgggcagagggtcaccatctcttgttctggaagcagctccaacatcggaagtaatcctgtaaactggtaccaacaactcccaggaacggcccccaaactcctcatctataataataatcagcggccctcaggggtccctgaccgattctctggctccaagtctggcacctcagcctccctggccatcagtgggctccagtctgaggatgaggctgattattactgtgcggcatgggatgacagtctgaatggtttattcggcggagggaccaagctgaccgtcctaa

SEQ ID NO: 2288 - DNA, 325 bp, Artificial Sequence
  Description of Artificial Sequence: Synthetic polynucleotide
tcttctgagctgactcaggaccctgctgtgtctgtggccttgggacagacagtcaggatcacatgccaaggagacagcctcagaagctattatgcaagctggtaccagcagaagccaggacaggcccctgtacttgtcatctatggtaaaaacaaccggccctcagggatcccagaccgattctctggctccagctcaggaaacacagcttccttgaccatcactggggctcaggcggaagatgaggctgactattattgtaattcccgggacagcagtggtgacgtacgagtgttcggcggagggaccaagctgaccgtcctag

SEQ ID NO: 2289 - DNA, 331 bp, Artificial Sequence
  Description of Artificial Sequence: Synthetic polynucleotide
cagcctgtgctgactcagccaccctcagcgtctgggacccccgggcagagggtcaccatctcttgttctggaagcagctccaacatcggaagtaatcctgtaaactggtaccagcagctcccaggaacggcccccaaactcctcatctatgataataatcagcgatacccaggggtccctgaccgattctctggctccaagtctggcacctcagcctccctggccatcagtgggctccggtccgaggatgaggctgattattactgtgaagcatgggatgacagcctgagtggtccggtgttcggcggagggaccaagctgaccgtcctag

SEQ ID NO: 2290 - DNA, 331 bp, Artificial Sequence
  Description of Artificial Sequence: Synthetic polynucleotide
cagcctgggctgactcagccaccctcagcgtctgggacccccgggcagggggtcaccatctcttgctctggaagcagctccaacatcggcggtaattctgtacactggtaccagcagctcccaggaacggcccccaaactcctcatctataggaataatcagcggccctcaggggttcctgaccgattttctggctccaagtctggcacctcagcctccctggccatcagtgggctccggtccgaggatgaggctgattattactgtgcagcatgggatgacagcctgaatggctgggtgttcggcggagggaccaagctgaccgtcctag

SEQ ID NO: 2291 - DNA, 337 bp, Artificial Sequence
  Description of Artificial Sequence: Synthetic polynucleotide
aattttatgctgactcagccccactctgtgtcggagtctccggggaagacggtcaccatctcctgcaccggcagcagtggcagcattgccagcaactatgtgcagtggctccagcagcgcctgggcagtgcccccaccactgtgatctatgaggataatcaaagaccctctggggtccctgatcggttctctggctccatcgacagctcctccaactctgcctccctcaccatctctggactgaagactgaggacgaggctgactactactgtcagtcttatgatcccaacaatcatggggtggtattcggcggagggaccaagctgaccgtcctag

SEQ ID NO: 2292 - protein, 99 aa, Artificial Sequence
  Description of Artificial Sequence: Synthetic polypeptide
EVQLVESGGGLVQPGRSLRLSCAASGFTFDDYAMHWVRQAPGKGLEWVSGISWNSGSIGYADSVKGRFTISRDNAKNSLYLQMNSLRAEDTALYYCAKD

SEQ ID NO: 2293 - protein, 122 aa, Artificial Sequence; identical to SEQ ID NO: 41
  Description of Artificial Sequence: Synthetic polypeptide

SEQ ID NO: 2294 - protein, 96 aa, Artificial Sequence
  Description of Artificial Sequence: Synthetic polypeptide
SYVLTQPPSVSVAPGQTARITCGGNNIGSKSVHWYQQKPGQAPVLVVYDDSDRPSGIPERFSGSNSGNTATLTISRVEAGDEADYYCQVWDSSSDH

SEQ ID NO: 2295 - protein, 108 aa, Artificial Sequence; identical to SEQ ID NO: 42
  Description of Artificial Sequence: Synthetic polypeptide

SEQ ID NO: 2296 - protein, 97 aa, Artificial Sequence
  Description of Artificial Sequence: Synthetic polypeptide
QVQLQESGPGLVKPSETLSLTCTVSGGSISSHYWSWIRQPPGKGLEWIGYIYYSGSTNYNPSLKSRVTISVDTSKNQFSLKLSSVTAADTAVYYCAR

SEQ ID NO: 2297 - protein, 115 aa, Artificial Sequence; identical to SEQ ID NO: 1
  Description of Artificial Sequence: Synthetic polypeptide

SEQ ID NO: 2298 - protein, 97 aa, Artificial Sequence
  Description of Artificial Sequence: Synthetic polypeptide
QSVLTQPPSASGTPGQRVTISCSGSSSNIGSNTVNWYQQLPGTAPKLLIYSNNQRPSGVPDRFSGSKSGTSASLAISGLQSEDEADYYCAAWDDSLN

SEQ ID NO: 2299 - protein, 111 aa, Artificial Sequence; identical to SEQ ID NO: 2
  Description of Artificial Sequence: Synthetic polypeptide

SEQ ID NO: 2300 - protein, 98 aa, Artificial Sequence
  Description of Artificial Sequence: Synthetic polypeptide
QVQLVESGGGVVQPGRSLRLSCAASGFTFSSYGMHWVRQAPGKGLEWVAVIWYDGSNKYYADSVKGRFTISRDNSKNTLYLQMNSLRAEDTAVYYCAR

SEQ ID NO: 2301 - protein, 127 aa, Artificial Sequence; identical to SEQ ID NO: 9
  Description of Artificial Sequence: Synthetic polypeptide

SEQ ID NO: 2302 - protein, 98 aa, Artificial Sequence
  Description of Artificial Sequence: Synthetic polypeptide
NFMLTQPHSVSESPGKTVTISCTRSSGSIASNYVQWYQQRPGSSPTTVIYEDNQRPSGVPDRFSGSIDSSSNSASLTISGLKTEDEADYYCQSYDSSN

SEQ ID NO: 2303 - protein, 111 aa, Artificial Sequence; identical to SEQ ID NO: 10
  Description of Artificial Sequence: Synthetic polypeptide

SEQ ID NO: 2304 - protein, 100 aa, Artificial Sequence
  Description of Artificial Sequence: Synthetic polypeptide
QITLKESGPTLVKPTQTLTLTCTFSGFSLSTSGVGVGWIRQPPGKALEWLALIYWNDDKRYSPSLKSRLTITKDTSKNQVVLTMTNMDPVDTATYYCAHR

SEQ ID NO: 2305 - protein, 122 aa, Artificial Sequence; identical to SEQ ID NO: 13
  Description of Artificial Sequence: Synthetic polypeptide

SEQ ID NO: 2306 - protein, 98 aa, Artificial Sequence; identical to SEQ ID NO: 2302
  Description of Artificial Sequence: Synthetic polypeptide

SEQ ID NO: 2307 - protein, 111 aa, Artificial Sequence; identical to SEQ ID NO: 14
  Description of Artificial Sequence: Synthetic polypeptide

SEQ ID NO: 2308 - protein, 97 aa, Artificial Sequence
  Description of Artificial Sequence: Synthetic polypeptide
QVQLQESGPGLVKPSETLSLTCTVSGGSISSYYWSWIRQPAGKGLEWIGRIYTSGSTNYNPSLKSRVTMSVDTSKNQFSLKLSSVTAADTAVYYCAR

SEQ ID NO: 2309 - protein, 117 aa, Artificial Sequence; identical to SEQ ID NO: 3
  Description of Artificial Sequence: Synthetic polypeptide

SEQ ID NO: 2310 - protein, 98 aa, Artificial Sequence; identical to SEQ ID NO: 2302
  Description of Artificial Sequence: Synthetic polypeptide

SEQ ID NO: 2311 - protein, 111 aa, Artificial Sequence; identical to SEQ ID NO: 4
  Description of Artificial Sequence: Synthetic polypeptide

SEQ ID NO: 2312 - protein, 99 aa, Artificial Sequence; identical to SEQ ID NO: 2292
  Description of Artificial Sequence: Synthetic polypeptide

SEQ ID NO: 2313 - protein, 122 aa, Artificial Sequence; identical to SEQ ID NO: 41
  Description of Artificial Sequence: Synthetic polypeptide

SEQ ID NO: 2314 - protein, 97 aa, Artificial Sequence; identical to SEQ ID NO: 2296
  Description of Artificial Sequence: Synthetic polypeptide

SEQ ID NO: 2315 - protein, 115 aa, Artificial Sequence; identical to SEQ ID NO: 1
  Description of Artificial Sequence: Synthetic polypeptide

SEQ ID NO: 2316 - protein, 98 aa, Artificial Sequence; identical to SEQ ID NO: 2300
  Description of Artificial Sequence: Synthetic polypeptide

SEQ ID NO: 2317 - protein, 127 aa, Artificial Sequence; identical to SEQ ID NO: 9
  Description of Artificial Sequence: Synthetic polypeptide

SEQ ID NO: 2318 - protein, 100 aa, Artificial Sequence; identical to SEQ ID NO: 2304
  Description of Artificial Sequence: Synthetic polypeptide

SEQ ID NO: 2319 - protein, 122 aa, Artificial Sequence; identical to SEQ ID NO: 13
  Description of Artificial Sequence: Synthetic polypeptide

SEQ ID NO: 2320 - protein, 97 aa, Artificial Sequence; identical to SEQ ID NO: 2308
  Description of Artificial Sequence: Synthetic polypeptide

SEQ ID NO: 2321 - protein, 117 aa, Artificial Sequence; identical to SEQ ID NO: 3
  Description of Artificial Sequence: Synthetic polypeptide

SEQ ID NO: 2322 - protein, 96 aa, Artificial Sequence; identical to SEQ ID NO: 2294
  Description of Artificial Sequence: Synthetic polypeptide

SEQ ID NO: 2323 - protein, 108 aa, Artificial Sequence; identical to SEQ ID NO: 42
  Description of Artificial Sequence: Synthetic polypeptide

SEQ ID NO: 2324 - protein, 97 aa, Artificial Sequence; identical to SEQ ID NO: 2298
  Description of Artificial Sequence: Synthetic polypeptide

SEQ ID NO: 2325 - protein, 111 aa, Artificial Sequence; identical to SEQ ID NO: 2
  Description of Artificial Sequence: Synthetic polypeptide

SEQ ID NO: 2326 - protein, 98 aa, Artificial Sequence; identical to SEQ ID NO: 2302
  Description of Artificial Sequence: Synthetic polypeptide

SEQ ID NO: 2327 - protein, 111 aa, Artificial Sequence; identical to SEQ ID NO: 10
  Description of Artificial Sequence: Synthetic polypeptide

SEQ ID NO: 2328 - protein, 98 aa, Artificial Sequence; identical to SEQ ID NO: 2302
  Description of Artificial Sequence: Synthetic polypeptide

SEQ ID NO: 2329 - protein, 111 aa, Artificial Sequence; identical to SEQ ID NO: 14
  Description of Artificial Sequence: Synthetic polypeptide

SEQ ID NO: 2330 - protein, 98 aa, Artificial Sequence; identical to SEQ ID NO: 2302
  Description of Artificial Sequence: Synthetic polypeptide

SEQ ID NO: 2331 - protein, 111 aa, Artificial Sequence; identical to SEQ ID NO: 4
  Description of Artificial Sequence: Synthetic polypeptide

SEQ ID NO: 2332 - DNA, 24 bp, Artificial Sequence
  Description of Artificial Sequence: Synthetic oligonucleotide
ggattcaccttcagtagctatgcc

SEQ ID NO: 2333 - DNA, 24 bp, Artificial Sequence
  Description of Artificial Sequence: Synthetic oligonucleotide
ggttacacctttaccacctctggt

SEQ ID NO: 2334 - DNA, 24 bp, Artificial Sequence
  Description of Artificial Sequence: Synthetic oligonucleotide
ggtggctccatcagaactcactcc

SEQ ID NO: 2335 - DNA, 24 bp, Artificial Sequence
  Description of Artificial Sequence: Synthetic oligonucleotide
ggattcaccttcagtagtcatgct

SEQ ID NO: 2336 - DNA, 24 bp, Artificial Sequence
  Description of Artificial Sequence: Synthetic oligonucleotide
ggattcaccttcactacgtatggc

SEQ ID NO: 2337 - DNA, 24 bp, Artificial Sequence
  Description of Artificial Sequence: Synthetic oligonucleotide
ggattcaccttcagtgattatcct

SEQ ID NO: 2338 - DNA, 24 bp, Artificial Sequence
  Description of Artificial Sequence: Synthetic oligonucleotide
ggattcacctttgatgattatgcc

SEQ ID NO: 2339 - DNA, 24 bp, Artificial Sequence
  Description of Artificial Sequence: Synthetic oligonucleotide
ggaggcaccttcagcagctatgct

SEQ ID NO: 2340 - DNA, 24 bp, Artificial Sequence
  Description of Artificial Sequence: Synthetic oligonucleotide
ggtggctccatcagaactcactcc

SEQ ID NO: 2341 - DNA, 24 bp, Artificial Sequence
  Description of Artificial Sequence: Synthetic oligonucleotide
ggattcacctttagtcactatgac

SEQ ID NO: 2342 - DNA, 30 bp, Artificial Sequence; identical to SEQ ID NO: 1951
  Description of Artificial Sequence: Synthetic oligonucleotide

SEQ ID NO: 2343 - DNA, 24 bp, Artificial Sequence
  Description of Artificial Sequence: Synthetic oligonucleotide
ggtggctccatcagtagttattac

SEQ ID NO: 2344 - DNA, 30 bp, Artificial Sequence
  Description of Artificial Sequence: Synthetic oligonucleotide
ggcttctcactcagcactagtggagtgggt

SEQ ID NO: 2345 - DNA, 30 bp, Artificial Sequence
  Description of Artificial Sequence: Synthetic oligonucleotide
ggggacagtgtctctagcaacagtgctgct

SEQ ID NO: 2346 - DNA, 24 bp, Artificial Sequence
  Description of Artificial Sequence: Synthetic oligonucleotide
ggattcacctttggtgattatgct

SEQ ID NO: 2347 - DNA, 24 bp, Artificial Sequence
  Description of Artificial Sequence: Synthetic oligonucleotide
ggattcaccttcagcaactacggc

SEQ ID NO: 2348 - DNA, 24 bp, Artificial Sequence
  Description of Artificial Sequence: Synthetic oligonucleotide
ggattcacctttgatgattatgcc

SEQ ID NO: 2349 - DNA, 24 bp, Artificial Sequence
  Description of Artificial Sequence: Synthetic oligonucleotide
ggattcagcttcagtcgttatggc

SEQ ID NO: 2350 - DNA, 24 bp, Artificial Sequence
  Description of Artificial Sequence: Synthetic oligonucleotide
ggatacagctttaccagctactgg

SEQ ID NO: 2351 - DNA, 24 bp, Artificial Sequence
  Description of Artificial Sequence: Synthetic oligonucleotide
ggatacagactcagtgactactac

SEQ ID NO: 2352 - DNA, 24 bp, Artificial Sequence
  Description of Artificial Sequence: Synthetic oligonucleotide
ggattcacctttgatgattatgcc

SEQ ID NO: 2353 - DNA, 24 bp, Artificial Sequence
  Description of Artificial Sequence: Synthetic oligonucleotide
ggattcacctttagtcactatgac

SEQ ID NO: 2354 - DNA, 24 bp, Artificial Sequence
  Description of Artificial Sequence: Synthetic oligonucleotide
ggaggcacgttcagcacctatggc

SEQ ID NO: 2355 - DNA, 24 bp, Artificial Sequence
  Description of Artificial Sequence: Synthetic oligonucleotide
ggaggcaccttcagcagctctggt

SEQ ID NO: 2356 - DNA, 24 bp, Artificial Sequence
  Description of Artificial Sequence: Synthetic oligonucleotide
ggattcacctttagtagctattgg

SEQ ID NO: 2357 - DNA, 24 bp, Artificial Sequence
  Description of Artificial Sequence: Synthetic oligonucleotide
ggattcacctttgatgattatgcc

SEQ ID NO: 2358 - DNA, 24 bp, Artificial Sequence
  Description of Artificial Sequence: Synthetic oligonucleotide
ggatacagcttcaccggctcccat

SEQ ID NO: 2359 - DNA, 24 bp, Artificial Sequence
  Description of Artificial Sequence: Synthetic oligonucleotide
ggtgcctccatcagtaattctttc

SEQ ID NO: 2360 - DNA, 24 bp, Artificial Sequence
  Description of Artificial Sequence: Synthetic oligonucleotide
atatcatatggtggaagtaataaa

SEQ ID NO: 2361 - DNA, 24 bp, Artificial Sequence
  Description of Artificial Sequence: Synthetic oligonucleotide
atcagcgcttacaatggtaacaca

SEQ ID NO: 2362 - DNA, 21 bp, Artificial Sequence
  Description of Artificial Sequence: Synthetic oligonucleotide
atccatcacagtggggccacc

SEQ ID NO: 2363 - DNA, 24 bp, Artificial Sequence
  Description of Artificial Sequence: Synthetic oligonucleotide
atctcatatgatggaagttacaca

SEQ ID NO: 2364 - DNA, 24 bp, Artificial Sequence
  Description of Artificial Sequence: Synthetic oligonucleotide
atatcatatgatggaagtattaaa

SEQ ID NO: 2365 - DNA, 24 bp, Artificial Sequence
  Description of Artificial Sequence: Synthetic oligonucleotide
acatcatatgatggacgtattaaa

SEQ ID NO: 2366 - DNA, 24 bp, Artificial Sequence
  Description of Artificial Sequence: Synthetic oligonucleotide
attgattggaatagtggtgtcata

SEQ ID NO: 2367 - DNA, 24 bp, Artificial Sequence
  Description of Artificial Sequence: Synthetic oligonucleotide
atcaaccctaacagtggtggcaca

SEQ ID NO: 2368 - DNA, 21 bp, Artificial Sequence
  Description of Artificial Sequence: Synthetic oligonucleotide
atccaccacagtggggccacc

SEQ ID NO: 2369 - DNA, 24 bp, Artificial Sequence
  Description of Artificial Sequence: Synthetic oligonucleotide
ataggctatgatggaactaatcta

SEQ ID NO: 2370 - DNA, 21 bp, Artificial Sequence
  Description of Artificial Sequence: Synthetic oligonucleotide
atttattggaatgatgataag

SEQ ID NO: 2371 - DNA, 21 bp, Artificial Sequence
  Description of Artificial Sequence: Synthetic oligonucleotide
atctataccagtgggagcacc

SEQ ID NO: 2372 - DNA, 21 bp, Artificial Sequence
  Description of Artificial Sequence: Synthetic oligonucleotide
atttattgggatgatgataag

SEQ ID NO: 2373 - DNA, 27 bp, Artificial Sequence
  Description of Artificial Sequence: Synthetic oligonucleotide
acttactacaggtccaggtggtataat

SEQ ID NO: 2374 - DNA, 30 bp, Artificial Sequence
  Description of Artificial Sequence: Synthetic oligonucleotide
attagaagcaaagcttatggtgggacaaca

SEQ ID NO: 2375 - DNA, 24 bp, Artificial Sequence
  Description of Artificial Sequence: Synthetic oligonucleotide
atatgggagcgtggaagtaagaaa

SEQ ID NO: 2376 - DNA, 24 bp, Artificial Sequence
  Description of Artificial Sequence: Synthetic oligonucleotide
attgattggaatagtggtgtcata

SEQ ID NO: 2377 - DNA, 24 bp, Artificial Sequence
  Description of Artificial Sequence: Synthetic oligonucleotide
atacgacatgatggatctaaaaag

SEQ ID NO: 2378 - DNA, 24 bp, Artificial Sequence
  Description of Artificial Sequence: Synthetic oligonucleotide
atctatcctggtgactctgatacc

SEQ ID NO: 2379 - DNA, 24 bp, Artificial Sequence
  Description of Artificial Sequence: Synthetic oligonucleotide
ataaagcaagatggaagtgagaaa

SEQ ID NO: 2380 - DNA, 24 bp, Artificial Sequence
  Description of Artificial Sequence: Synthetic oligonucleotide
attagttggaatagtggtagcata

SEQ ID NO: 2381 - DNA, 24 bp, Artificial Sequence
  Description of Artificial Sequence: Synthetic oligonucleotide
ataggctatgatggaactaatcta

SEQ ID NO: 2382 - DNA, 24 bp, Artificial Sequence
  Description of Artificial Sequence: Synthetic oligonucleotide
atcatccctagcctgggtatacca

SEQ ID NO: 2383 - DNA, 24 bp, Artificial Sequence
  Description of Artificial Sequence: Synthetic oligonucleotide
atcatccctatgcttggtactcca

SEQ ID NO: 2384 - DNA, 24 bp, Artificial Sequence
  Description of Artificial Sequence: Synthetic oligonucleotide
ataaagcaagatggaagtgagaaa

SEQ ID NO: 2385 - DNA, 24 bp, Artificial Sequence
  Description of Artificial Sequence: Synthetic oligonucleotide
attgattggaatagtggtgtcata

SEQ ID NO: 2386 - DNA, 24 bp, Artificial Sequence
  Description of Artificial Sequence: Synthetic oligonucleotide
atcaaccctgacagtggtgtcata

SEQ ID NO: 2387 - DNA, 21 bp, Artificial Sequence
  Description of Artificial Sequence: Synthetic oligonucleotide
acctcttacagtggcaattcc

SEQ ID NO: 2388 - DNA, 48 bp, Artificial Sequence; identical to SEQ ID NO: 2037
  Description of Artificial Sequence: Synthetic oligonucleotide

SEQ ID NO: 2389 - DNA, 36 bp, Artificial Sequence; identical to SEQ ID NO: 2028
  Description of Artificial Sequence: Synthetic oligonucleotide

SEQ ID NO: 2390 - DNA, 27 bp, Artificial Sequence
  Description of Artificial Sequence: Synthetic oligonucleotide
gcgagaggacctgggatactgtcatac

SEQ ID NO: 2391 - DNA, 33 bp, Artificial Sequence; identical to SEQ ID NO: 2030
  Description of Artificial Sequence: Synthetic oligonucleotide

SEQ ID NO: 2392 - DNA, 42 bp, Artificial Sequence; identical to SEQ ID NO: 2029
  Description of Artificial Sequence: Synthetic oligonucleotide

SEQ ID NO: 2393 - DNA, 42 bp, Artificial Sequence; identical to SEQ ID NO: 2031
  Description of Artificial Sequence: Synthetic oligonucleotide

SEQ ID NO: 2394 - DNA, 45 bp, Artificial Sequence; identical to SEQ ID NO: 2039
  Description of Artificial Sequence: Synthetic oligonucleotide

SEQ ID NO: 2395 - DNA, 30 bp, Artificial Sequence; identical to SEQ ID NO: 2032
  Description of Artificial Sequence: Synthetic oligonucleotide

SEQ ID NO: 2396 - DNA, 27 bp, Artificial Sequence
  Description of Artificial Sequence: Synthetic oligonucleotide
gcgagaggacctggcatactgtcatac

SEQ ID NO: 2397 - DNA, 60 bp, Artificial Sequence; identical to SEQ ID NO: 2026
  Description of Artificial Sequence: Synthetic oligonucleotide

SEQ ID NO: 2398 - DNA, 42 bp, Artificial Sequence; identical to SEQ ID NO: 2041
  Description of Artificial Sequence: Synthetic oligonucleotide

SEQ ID NO: 2399 - DNA, 33 bp, Artificial Sequence; identical to SEQ ID NO: 2024
  Description of Artificial Sequence: Synthetic oligonucleotide

SEQ ID NO: 2400 - DNA, 42 bp, Artificial Sequence; identical to SEQ ID NO: 2041
  Description of Artificial Sequence: Synthetic oligonucleotide

SEQ ID NO: 2401 - DNA, 27 bp, Artificial Sequence
  Description of Artificial Sequence: Synthetic oligonucleotide
gcaagagagatacgggggtttgactac

SEQ ID NO: 2402 - DNA, 27 bp, Artificial Sequence
  Description of Artificial Sequence: Synthetic oligonucleotide
accacagcggacgacgacatggacgtc

SEQ ID NO: 2403 - DNA, 45 bp, Artificial Sequence
  Description of Artificial Sequence: Synthetic oligonucleotide
gcgagagaaggaattagtatgaccggcgctgaatacttccagcac

SEQ ID NO: 2404 - DNA, 51 bp, Artificial Sequence
  Description of Artificial Sequence: Synthetic oligonucleotide
gcaaaagatatagggccggggggaagtgggagttactatgcttttgatatc

SEQ ID NO: 2405 - DNA, 36 bp, Artificial Sequence
  Description of Artificial Sequence: Synthetic oligonucleotide
gcgaaagatgggcgtctagaagcagcccttgacgac

SEQ ID NO: 2406 - DNA, 33 bp, Artificial Sequence
  Description of Artificial Sequence: Synthetic oligonucleotide
gcgagacggggagaccttgatgcttttgatatc

SEQ ID NO: 2407 - DNA, 39 bp, Artificial Sequence
  Description of Artificial Sequence: Synthetic oligonucleotide
gcgagagttcgaggctggtcaaggggctactttgactac

SEQ ID NO: 2408 - DNA, 30 bp, Artificial Sequence; identical to SEQ ID NO: 2055
  Description of Artificial Sequence: Synthetic oligonucleotide

SEQ ID NO: 2409 - DNA, 60 bp, Artificial Sequence; identical to SEQ ID NO: 2026
  Description of Artificial Sequence: Synthetic oligonucleotide

SEQ ID NO: 2410 - DNA, 36 bp, Artificial Sequence
  Description of Artificial Sequence: Synthetic oligonucleotide
gcgagagagaacatcgacttggctacaaatgacttc

SEQ ID NO: 2411 - DNA, 27 bp, Artificial Sequence
  Description of Artificial Sequence: Synthetic oligonucleotide
gcgagagatggaggtaattacgactac

SEQ ID NO: 2412 - DNA, 36 bp, Artificial Sequence; identical to SEQ ID NO: 2044
  Description of Artificial Sequence: Synthetic oligonucleotide

SEQ ID NO: 2413 - DNA, 45 bp, Artificial Sequence; identical to SEQ ID NO: 2039
  Description of Artificial Sequence: Synthetic oligonucleotide

SEQ ID NO: 2414 - DNA, 42 bp, Artificial Sequence; identical to SEQ ID NO: 2040
  Description of Artificial Sequence: Synthetic oligonucleotide

SEQ ID NO: 2415 - DNA, 36 bp, Artificial Sequence; identical to SEQ ID NO: 2057
  Description of Artificial Sequence: Synthetic oligonucleotide

SEQ ID NO: 2416 - DNA, 370 bp, Artificial Sequence; identical to SEQ ID NO: 2082
  Description of Artificial Sequence: Synthetic polynucleotide

SEQ ID NO: 2417 - DNA, 358 bp, Artificial Sequence; identical to SEQ ID NO: 2073
  Description of Artificial Sequence: Synthetic polynucleotide

SEQ ID NO: 2418 - DNA, 346 bp, Artificial Sequence; identical to SEQ ID NO: 2079
  Description of Artificial Sequence: Synthetic polynucleotide

SEQ ID NO: 2419 - DNA, 354 bp, Artificial Sequence; identical to SEQ ID NO: 2075
  Description of Artificial Sequence: Synthetic polynucleotide

SEQ ID NO: 2420 - DNA, 363 bp, Artificial Sequence; identical to SEQ ID NO: 2074
  Description of Artificial Sequence: Synthetic polynucleotide

SEQ ID NO: 2421 - DNA, 363 bp, Artificial Sequence; identical to SEQ ID NO: 2076
  Description of Artificial Sequence: Synthetic polynucleotide

SEQ ID NO: 2422 - DNA, 367 bp, Artificial Sequence; identical to SEQ ID NO: 2084
  Description of Artificial Sequence: Synthetic polynucleotide

SEQ ID NO: 2423 - DNA, 352 bp, Artificial Sequence; identical to SEQ ID NO: 2077
  Description of Artificial Sequence: Synthetic polynucleotide

SEQ ID NO: 2424 - DNA, 346 bp, Artificial Sequence; identical to SEQ ID NO: 2078
  Description of Artificial Sequence: Synthetic polynucleotide

SEQ ID NO: 2425 - DNA, 382 bp, Artificial Sequence; identical to SEQ ID NO: 2071
  Description of Artificial Sequence: Synthetic polynucleotide

SEQ ID NO: 2426 - DNA, 367 bp, Artificial Sequence; identical to SEQ ID NO: 2086
  Description of Artificial Sequence: Synthetic polynucleotide

SEQ ID NO: 2427 - DNA, 352 bp, Artificial Sequence; identical to SEQ ID NO: 2069
  Description of Artificial Sequence: Synthetic polynucleotide

SEQ ID NO: 2428 - DNA, 367 bp, Artificial Sequence
  Description of Artificial Sequence: Synthetic polynucleotide
caggtcaccttgaaggagtctggtcctaagctggtgaaacccacacagaccctcacgctgacctgcaccttctctggcttctcactcagcactagtggagtgggtgtgggctggatccgtcagcccccaggaaaggccctggagtggcttgcactcatttattgggatgatgataagcgctacagcccatctctgaagagcaggctcaccatcgccaaggacacctccaaataccaggtggtccttacaatgaccaacatggaccctgttgacacagccacgtattactgtgcacggatcagcggtagtggttatttctatccgtttgatatctggggccaagggacaatggtcaccgtctctgcag

SEQ ID NO: 2429 - DNA, 358 bp, Artificial Sequence
  Description of Artificial Sequence: Synthetic polynucleotide
caggtacagctgcagcagtcaggtccaggactggtgaagccctcgcagaccctctcactcacctgtgccatctccggggacagtgtctctagcaacagtgctgcttggaactggatcaggcagtccccagcgagaggccttgagtggctgggaaggacttactacaggtccaggtggtataatgattatgcaatatctatgaaaagtcgaataaccatcaacccagacacatccaagaaccagttctccctgcagctggagtctgtgactcccgaggacacggctgtgtattattgtgcaagagagatacgggggtttgactactggggccagggcaccctggtcaccgtctcctcag

SEQ ID NO: 2430 - DNA, 354 bp, Artificial Sequence
  Description of Artificial Sequence: Synthetic polynucleotide
caggtgcagctggtgcaatctgggggaggcttggtaaagccagggcggtccctgagactttcctgtacagcttctggattcacctttggtgattatgctatgagctggttccgccaggctccagggaaggggctggagtgggtaggtttcattagaagcaaagcttatggtgggacaacaggatacgccgcgtctgtgaaaggcagattcaccatctcaagagatgattccaaaagcatcgcctatctgcaaatgaacagcctgaaaaccgaggacacagccgtgtattactgtaccacagcggacgacgacatggacgtctggggcaaagggaccacggtcaccgtctcctca

SEQ ID NO: 2431 - DNA, 367 bp, Artificial Sequence
  Description of Artificial Sequence: Synthetic polynucleotide
caggtgcagctggtgcaatctgggggaggcgtggtccagcctggaaggtccctgagactctcctgtgcagcgtctggattcaccttcagcaactacggcatgcactgggtccgccaggctccaggcaaggggctggagtgggtggcacttatatgggagcgtggaagtaagaaagactatgccgactccgtgaagggccgattcaccgtctccagagacaattccaagaacacgttgtatctgcaaatgaacagcctgagacccgaggacacggctgtgtatttctgtgcgagagaaggaattagtatgaccggcgctgaatacttccagcactggggccagggcaccctggtcaccgtctcctcag

SEQ ID NO: 2432 - DNA, 373 bp, Artificial Sequence
  Description of Artificial Sequence: Synthetic polynucleotide
caggtgcagctggtgcagtctgggggaggcgtggtccagcctgggaggtccctgagactctcctgtgcagcctctggattcacctttgatgattatgccatgcactgggtccggcaagttccagggaagggcctggagtgggtctcaggtattgattggaatagtggtgtcatagggtatgcggactctgtgaagggccgattcaccatctccagagacaatgtcaagaactccctgtatctgcaaatgaacagtctgagaactgaggactcggccttgtattactgtgcaaaagatatagggccggggggaagtgggagttactatgcttttgatatctggggccaagggaccacggtcaccgtctcctcag

SEQ ID NO: 2433 - DNA, 358 bp, Artificial Sequence
  Description of Artificial Sequence: Synthetic polynucleotide
gaggtgcagctggtgcagtctgggggaggcgtggtccagcctgggaggtccctgagagtctcctgtgcagcgtctggattcagcttcagtcgttatggcatgcactgggtccgccaggctccaggcaaggggctggagtgggtggcatttatacgacatgatggatctaaaaagtactatgcagactctgtggagggccgattcaccatctccagagacaattccaggaatacagtgtctttggaaatgaacagtctgagaggcgaagacacggctgtctactactgtgcgaaagatgggcgtctagaagcagcccttgacgactggggccagggaaccctggtcaccgtctcctcag

SEQ ID NO: 2434 - DNA, 355 bp, Artificial Sequence
  Description of Artificial Sequence: Synthetic polynucleotide
gaggtgcagctggtggagtctggagctgaggtgaaaaagccgggggagtctctgaagatctcctgtaagggttctggatacagctttaccagctactggatcggctgggtgcgccagatgcccgggaaaggcctggagtggatggggatcatctatcctggtgactctgataccagatacagcccgtccttccaaggccaggtcaccatctcagccgacaagtccatcagcaccgcctacctgcagtggagcagcctgaaggcctcggacaccgccatgtattactgtgcgagacggggagaccttgatgcttttgatatctggggccaagggacaatggtcaccgtctcttcag

SEQ ID NO: 2435 - DNA, 361 bp, Artificial Sequence
  Description of Artificial Sequence: Synthetic polynucleotide
caggtgcagctggtgcagtctgggggaggctcggtcaagcctggagggtccctgagactctcctgtgcagcctctggatacagactcagtgactactacatgcactgggtccgccaggctccaggcaaggggctagagtgggtggccaacataaagcaagatggaagtgagaaatactatgtggactctgtgaagggccgattcaccatctccagagacaacgccaagaactcactgtatctgcaaatgaacagcctgagagccgaggacacggctgtgtattactgtgcgagagttcgaggctggtcaaggggctactttgactactggggccagggaaccctggtcaccgtctcctcag

SEQ ID NO: 2436 - DNA, 352 bp, Artificial Sequence; identical to SEQ ID NO: 2100
  Description of Artificial Sequence: Synthetic polynucleotide

SEQ ID NO: 2437 - DNA, 382 bp, Artificial Sequence; identical to SEQ ID NO: 2071
  Description of Artificial Sequence: Synthetic polynucleotide

SEQ ID NO: 2438 - DNA, 358 bp, Artificial Sequence
  Description of Artificial Sequence: Synthetic polynucleotide
gaggtgcagctggtgcagtctggggccgaggtgaagaagcctgggtcctcggtgaaggtctcctgcaggtcttctggaggcacgttcagcacctatggcatcacctgggtgcgtcaggcccctggacaagggcttgagtggatgggaaggatcatccctagcctgggtataccaaactacgcacagaaattccagggcagagtcacgattaccgcggacacatccgtctccacagcctggatggaattgagcagcctggaaagtgatgacacggccatatattactgtgcgagagagaacatcgacttggctacaaatgacttctggggtcagggaaccctggtcaccgtctcctcag

SEQ ID NO: 2439 - DNA, 349 bp, Artificial Sequence
  Description of Artificial Sequence: Synthetic polynucleotide
caggtgcagctggtgcagtctggggctgaggtgaagacgcctgggtcctcggtgaaggtctcctgcaaggcttctggaggcaccttcagcagctctggtgtcagctgggtgcgacaggcccctggacaagggcttgagtggatgggagggatcatccctatgcttggtactccaaactacgcccagaagttccagggcagaatcacgattaccgcggacgaagccacgagtacagtgtacatggcgctgagcagcctgagatctgaggacacggccatgtattactgtgcgagagatggaggtaattacgactactggggccagggaaccctggtcaccgtctcctcag

SEQ ID NO: 2440 - DNA, 358 bp, Artificial Sequence; identical to SEQ ID NO: 2089
  Description of Artificial Sequence: Synthetic polynucleotide

SEQ ID NO: 2441 - DNA, 367 bp, Artificial Sequence; identical to SEQ ID NO: 2084
  Description of Artificial Sequence: Synthetic polynucleotide

SEQ ID NO: 2442 - DNA, 364 bp, Artificial Sequence; identical to SEQ ID NO: 2085
  Description of Artificial Sequence: Synthetic polynucleotide

SEQ ID NO: 2443 - DNA, 355 bp, Artificial Sequence; identical to SEQ ID NO: 2102
  Description of Artificial Sequence: Synthetic polynucleotide

SEQ ID NO: 2444 - DNA, 18 bp, Artificial Sequence
  Description of Artificial Sequence: Synthetic oligonucleotide
agcctcagagcctatttt

SEQ ID NO: 2445 - DNA, 27 bp, Artificial Sequence
  Description of Artificial Sequence: Synthetic oligonucleotide
agcagtgacgttggtgcttataactat

SEQ ID NO: 2446 - DNA, 24 bp, Artificial Sequence
  Description of Artificial Sequence: Synthetic oligonucleotide
agctccaacatcggaagtaatgat

SEQ ID NO: 2447 - DNA, 27 bp, Artificial Sequence
  Description of Artificial Sequence: Synthetic oligonucleotide
agcagtgacgttggtggttataactat

SEQ ID NO: 2448 - DNA, 24 bp, Artificial Sequence
  Description of Artificial Sequence: Synthetic oligonucleotide
agctccaacatcggaagtaatagt

SEQ ID NO: 2449 - DNA, 24 bp, Artificial Sequence
  Description of Artificial Sequence: Synthetic oligonucleotide
agtggcagcattgcccgcaactat

SEQ ID NO: 2450 - DNA, 18 bp, Artificial Sequence
  Description of Artificial Sequence: Synthetic oligonucleotide
aacattgggagtaaaagt

SEQ ID NO: 2451 - DNA, 24 bp, Artificial Sequence
  Description of Artificial Sequence: Synthetic oligonucleotide
agcaacaatgttggcaaccaagga

SEQ ID NO: 2452 - DNA, 24 bp, Artificial Sequence
  Description of Artificial Sequence: Synthetic oligonucleotide
agctccaacatcggaagtaatact

SEQ ID NO: 2453 - DNA, 24 bp, Artificial Sequence
  Description of Artificial Sequence: Synthetic oligonucleotide
actggcagcattgccggcaactat

SEQ ID NO: 2454 - DNA, 24 bp, Artificial Sequence
  Description of Artificial Sequence: Synthetic oligonucleotide
agtggcagcattgccagcaactat

SEQ ID NO: 2455 - DNA, 24 bp, Artificial Sequence
  Description of Artificial Sequence: Synthetic oligonucleotide
agtggcagcattgccagcaactat

SEQ ID NO: 2456 - DNA, 24 bp, Artificial Sequence
  Description of Artificial Sequence: Synthetic oligonucleotide
agtggcagcattgccagcaactat

SEQ ID NO: 2457 - DNA, 27 bp, Artificial Sequence
  Description of Artificial Sequence: Synthetic oligonucleotide
agcagtgacgttggtgcttataacttt

SEQ ID NO: 2458 - DNA, 24 bp, Artificial Sequence
  Description of Artificial Sequence: Synthetic oligonucleotide
agtggcaccattgccagcaactat

SEQ ID NO: 2459 - DNA, 27 bp, Artificial Sequence
  Description of Artificial Sequence: Synthetic oligonucleotide
agttccaacatcggggcaggatatgat

SEQ ID NO: 2460 - DNA, 27 bp, Artificial Sequence
  Description of Artificial Sequence: Synthetic oligonucleotide
agcagtgacgttggtggttctaagtat

SEQ ID NO: 2461 - DNA, 24 bp, Artificial Sequence
  Description of Artificial Sequence: Synthetic oligonucleotide
agtggcagcattgccaacaacttt

SEQ ID NO: 2462 - DNA, 24 bp, Artificial Sequence
  Description of Artificial Sequence: Synthetic oligonucleotide
agcgccaacatcggaagtaatgct

SEQ ID NO: 2463 - DNA, 24 bp, Artificial Sequence
  Description of Artificial Sequence: Synthetic oligonucleotide
agtggcagcattgccagcaactat

SEQ ID NO: 2464 - DNA, 27 bp, Artificial Sequence
  Description of Artificial Sequence: Synthetic oligonucleotide
agcagtgacgttggtggttatgactat

SEQ ID NO: 2465 - DNA, 24 bp, Artificial Sequence
  Description of Artificial Sequence: Synthetic oligonucleotide
actggcagcattgccggcaactat

SEQ ID NO: 2466 - DNA, 27 bp, Artificial Sequence
  Description of Artificial Sequence: Synthetic oligonucleotide
agcagagacattggtgcttatggttat

SEQ ID NO: 2467 - DNA, 24 bp, Artificial Sequence
  Description of Artificial Sequence: Synthetic oligonucleotide
agctccaatatcggacgtaatgct

SEQ ID NO: 2468 - DNA, 24 bp, Artificial Sequence
  Description of Artificial Sequence: Synthetic oligonucleotide
agtggcagcattgccagcaactat

SEQ ID NO: 2469 - DNA, 18 bp, Artificial Sequence
  Description of Artificial Sequence: Synthetic oligonucleotide
aatattcggactaaaggc

SEQ ID NO: 2470 - DNA, 27 bp, Artificial Sequence
  Description of Artificial Sequence: Synthetic oligonucleotide
agcagtgacgttggtacttataaccgt

SEQ ID NO: 2471 - DNA, 24 bp, Artificial Sequence
  Description of Artificial Sequence: Synthetic oligonucleotide
ggtggcagcattgccagcaactat

SEQ ID NO: 2472 - DNA, 9 bp, Artificial Sequence
  Description of Artificial Sequence: Synthetic oligonucleotide
ggtcaagac

SEQ ID NO: 2473 - DNA, 9 bp, Artificial Sequence
  Description of Artificial Sequence: Synthetic oligonucleotide
gacgtcact

SEQ ID NO: 2474 - DNA, 9 bp, Artificial Sequence
  Description of Artificial Sequence: Synthetic oligonucleotide
agtaacaat

SEQ ID NO: 2475 - DNA, 9 bp, Artificial Sequence
  Description of Artificial Sequence: Synthetic oligonucleotide
gaggtcagt

SEQ ID NO: 2476 - DNA, 9 bp, Artificial Sequence
  Description of Artificial Sequence: Synthetic oligonucleotide
agtaataat

SEQ ID NO: 2477 - DNA, 9 bp, Artificial Sequence
  Description of Artificial Sequence: Synthetic oligonucleotide
gcggatagg

SEQ ID NO: 2478 - DNA, 9 bp, Artificial Sequence
  Description of Artificial Sequence: Synthetic oligonucleotide
gaagatagg

SEQ ID NO: 2479 - DNA, 9 bp, Artificial Sequence
  Description of Artificial Sequence: Synthetic oligonucleotide
atgaataac

SEQ ID NO: 2480 - DNA, 9 bp, Artificial Sequence
  Description of Artificial Sequence: Synthetic oligonucleotide
agtaataat

SEQ ID NO: 2481 - DNA, 9 bp, Artificial Sequence
  Description of Artificial Sequence: Synthetic oligonucleotide
gatgataat

SEQ ID NO: 2482 - DNA, 9 bp, Artificial Sequence
  Description of Artificial Sequence: Synthetic oligonucleotide
gaggataac

SEQ ID NO: 2483 - DNA, 9 bp, Artificial Sequence
  Description of Artificial Sequence: Synthetic oligonucleotide
gaggataac

SEQ ID NO: 2484 - DNA, 9 bp, Artificial Sequence
  Description of Artificial Sequence: Synthetic oligonucleotide
gaggataac

SEQ ID NO: 2485 - DNA, 9 bp, Artificial Sequence
  Description of Artificial Sequence: Synthetic oligonucleotide
gacttcaat

SEQ ID NO: 2486 - DNA, 9 bp, Artificial Sequence
  Description of Artificial Sequence: Synthetic oligonucleotide
gaggataac

SEQ ID NO: 2487 - DNA, 9 bp, Artificial Sequence
  Description of Artificial Sequence: Synthetic oligonucleotide
ggtaccaat

SEQ ID NO: 2488 - DNA, 9 bp, Artificial Sequence
  Description of Artificial Sequence: Synthetic oligonucleotide
gatgtcact

SEQ ID NO: 2489 - DNA, 9 bp, Artificial Sequence
  Description of Artificial Sequence: Synthetic oligonucleotide
gaggataac

SEQ ID NO: 2490 - DNA, 9 bp, Artificial Sequence
  Description of Artificial Sequence: Synthetic oligonucleotide
ggtaacact

SEQ ID NO: 2491 - DNA, 9 bp, Artificial Sequence
  Description of Artificial Sequence: Synthetic oligonucleotide
gaggataac

SEQ ID NO: 2492 - DNA, 9 bp, Artificial Sequence
  Description of Artificial Sequence: Synthetic oligonucleotide
gatgtcagt

SEQ ID NO: 2493 - DNA, 9 bp, Artificial Sequence
  Description of Artificial Sequence: Synthetic oligonucleotide
gatgataat

SEQ ID NO: 2494 - DNA, 9 bp, Artificial Sequence
  Description of Artificial Sequence: Synthetic oligonucleotide
gaggtccgt

SEQ ID NO: 2495 - DNA, 9 bp, Artificial Sequence
  Description of Artificial Sequence: Synthetic oligonucleotide
agtaataat

SEQ ID NO: 2496 - DNA, 9 bp, Artificial Sequence
  Description of Artificial Sequence: Synthetic oligonucleotide
gaggataac

SEQ ID NO: 2497 - DNA, 9 bp, Artificial Sequence
  Description of Artificial Sequence: Synthetic oligonucleotide
tatgctagc

SEQ ID NO: 2498 - DNA, 9 bp, Artificial Sequence
  Description of Artificial Sequence: Synthetic oligonucleotide
gaggtcagt

SEQ ID NO: 2499 - DNA, 9 bp, Artificial Sequence
  Description of Artificial Sequence: Synthetic oligonucleotide
gaggataac

SEQ ID NO: 2500 - DNA, 33 bp, Artificial Sequence; identical to SEQ ID NO: 2217
  Description of Artificial Sequence: Synthetic oligonucleotide

SEQ ID NO: 2501 - DNA, 36 bp, Artificial Sequence; identical to SEQ ID NO: 2208
  Description of Artificial Sequence: Synthetic oligonucleotide

SEQ ID NO: 2502 - DNA, 33 bp, Artificial Sequence; identical to SEQ ID NO: 2214
  Description of Artificial Sequence: Synthetic oligonucleotide

SEQ ID NO: 2503 - DNA, 33 bp, Artificial Sequence; identical to SEQ ID NO: 2210
  Description of Artificial Sequence: Synthetic oligonucleotide

SEQ ID NO: 2504 - DNA, 33 bp, Artificial Sequence; identical to SEQ ID NO: 2209
  Description of Artificial Sequence: Synthetic oligonucleotide

SEQ ID NO: 2505 - DNA, 33 bp, Artificial Sequence; identical to SEQ ID NO: 2211
  Description of Artificial Sequence: Synthetic oligonucleotide

SEQ ID NO: 2506 - DNA, 33 bp, Artificial Sequence; identical to SEQ ID NO: 2219
  Description of Artificial Sequence: Synthetic oligonucleotide

SEQ ID NO: 2507 - DNA, 33 bp, Artificial Sequence; identical to SEQ ID NO: 2212
  Description of Artificial Sequence: Synthetic oligonucleotide

SEQ ID NO: 2508 - DNA, 36 bp, Artificial Sequence; identical to SEQ ID NO: 2213
  Description of Artificial Sequence: Synthetic oligonucleotide

SEQ ID NO: 2509 - DNA, 30 bp, Artificial Sequence; identical to SEQ ID NO: 2206
  Description of Artificial Sequence: Synthetic oligonucleotide

SEQ ID NO: 2510 - DNA, 30 bp, Artificial Sequence; identical to SEQ ID NO: 2221
  Description of Artificial Sequence: Synthetic oligonucleotide

SEQ ID NO: 2511 - DNA, 30 bp, Artificial Sequence; identical to SEQ ID NO: 2204
  Description of Artificial Sequence: Synthetic oligonucleotide

SEQ ID NO: 2512 - DNA, 30 bp, Artificial Sequence
  Description of Artificial Sequence: Synthetic oligonucleotide
cagtcttatgatagcagcaatctttgggtg

SEQ ID NO: 2513 - DNA, 36 bp, Artificial Sequence
  Description of Artificial Sequence: Synthetic oligonucleotide
agctcatatgcaggcagcaacaatttcgatgtggta

SEQ ID NO: 2514 - DNA, 30 bp, Artificial Sequence
  Description of Artificial Sequence: Synthetic oligonucleotide
cagtcttatgataccagcaatcattatgtc

SEQ ID NO: 2515 - DNA, 36 bp, Artificial Sequence
  Description of Artificial Sequence: Synthetic oligonucleotide
cagtcctatgacaacagtctgactgatccgtatgtc

SEQ ID NO: 2516 - DNA, 33 bp, Artificial Sequence
  Description of Artificial Sequence: Synthetic oligonucleotide
gcagcatgggatgacagcctgaatggtgtggta

SEQ ID NO: 2517 - DNA, 27 bp, Artificial Sequence
  Description of Artificial Sequence: Synthetic oligonucleotide
cagtcttatgatagcagcaatctggtg

SEQ ID NO: 2518 - DNA, 33 bp, Artificial Sequence
  Description of Artificial Sequence: Synthetic oligonucleotide
gcagcatgggatgacagtttaaatggttatgtc

SEQ ID NO: 2519 - DNA, 30 bp, Artificial Sequence; identical to SEQ ID NO: 2224
  Description of Artificial Sequence: Synthetic oligonucleotide

SEQ ID NO: 2520 - DNA, 30 bp, Artificial Sequence; identical to SEQ ID NO: 2235
  Description of Artificial Sequence: Synthetic oligonucleotide

SEQ ID NO: 2521 - DNA, 30 bp, Artificial Sequence; identical to SEQ ID NO: 2206
  Description of Artificial Sequence: Synthetic oligonucleotide

SEQ ID NO: 2522 - DNA, 36 bp, Artificial Sequence
  Description of Artificial Sequence: Synthetic oligonucleotide
agctcatatacaagcagcagcactctcgatgtggta

SEQ ID NO: 2523 - DNA, 33 bp, Artificial Sequence
  Description of Artificial Sequence: Synthetic oligonucleotide
tcagcatgggacaccagcctcagtacttgggtg

SEQ ID NO: 2524 - DNA, 30 bp, Artificial Sequence; identical to SEQ ID NO: 2224
  Description of Artificial Sequence: Synthetic oligonucleotide

SEQ ID NO: 2525 - DNA, 33 bp, Artificial Sequence; identical to SEQ ID NO: 2234
  Description of Artificial Sequence: Synthetic oligonucleotide

SEQ ID NO: 2526 - DNA, 30 bp, Artificial Sequence; identical to SEQ ID NO: 2220
  Description of Artificial Sequence: Synthetic oligonucleotide

SEQ ID NO: 2527 - DNA, 30 bp, Artificial Sequence; identical to SEQ ID NO: 2237
  Description of Artificial Sequence: Synthetic oligonucleotide

SEQ ID NO: 2528 - DNA, 325 bp, Artificial Sequence; identical to SEQ ID NO: 2262
  Description of Artificial Sequence: Synthetic polynucleotide

SEQ ID NO: 2529 - DNA, 337 bp, Artificial Sequence; identical to SEQ ID NO: 2253
  Description of Artificial Sequence: Synthetic polynucleotide

SEQ ID NO: 2530 - DNA, 331 bp, Artificial Sequence; identical to SEQ ID NO: 2259
  Description of Artificial Sequence: Synthetic polynucleotide

SEQ ID NO: 2531 - DNA, 334 bp, Artificial Sequence; identical to SEQ ID NO: 2255
  Description of Artificial Sequence: Synthetic polynucleotide

SEQ ID NO: 2532 - DNA, 331 bp, Artificial Sequence; identical to SEQ ID NO: 2254
  Description of Artificial Sequence: Synthetic polynucleotide

SEQ ID NO: 2533 - DNA, 337 bp, Artificial Sequence; identical to SEQ ID NO: 2256
  Description of Artificial Sequence: Synthetic polynucleotide

SEQ ID NO: 2534 - DNA, 325 bp, Artificial Sequence; identical to SEQ ID NO: 2264
  Description of Artificial Sequence: Synthetic polynucleotide

SEQ ID NO: 2535 - DNA, 331 bp, Artificial Sequence; identical to SEQ ID NO: 2257
  Description of Artificial Sequence: Synthetic polynucleotide

SEQ ID NO: 2536 - DNA, 334 bp, Artificial Sequence; identical to SEQ ID NO: 2258
  Description of Artificial Sequence: Synthetic polynucleotide

SEQ ID NO: 2537 - DNA, 334 bp, Artificial Sequence
  Description of Artificial Sequence: Synthetic polynucleotide
aattttatgctgactcagccccactctgtgtcggagtctccggggaagacggtaatcatctcctgcacccgcaccactggcagcattgccggcaactatgtgcagtggtatcggcagcggccgggcagtgcccccaccactgtgatctatgatgataatcaacgacccgctggggtccctgatcggttctctggctccgtcgacagctcctccaactctgcctccctcaccatcactggactgaagactgaggacgaggctgactattattgtcagtcttatgatagcggcaaccggggagtcttcggaactgggaccaaactcaccgtcctag

SEQ ID NO: 2538 - DNA, 334 bp, Artificial Sequence; identical to SEQ ID NO: 2266
  Description of Artificial Sequence: Synthetic polynucleotide

SEQ ID NO: 2539 - DNA, 334 bp, Artificial Sequence; identical to SEQ ID NO: 2249
  Description of Artificial Sequence: Synthetic polynucleotide

SEQ ID NO: 2540 - DNA, 334 bp, Artificial Sequence
  Description of Artificial Sequence: Synthetic polynucleotide
aattttatgctgactcagccccactctgtgtcggagtctccggggaagacggtaaccatctcctgcacccgcagcagtggcagcattgccagcaactatgtgcagtggtaccagcagcgcccgggcagtgcccccaccactgtgatctatgaggataaccaaagaccctctggggtccctgatcggttctctggctccatcgacagctcctccaactctgcctccctcaccatctctggactgaagactgaggacgaggctgactactactgtcagtcttatgatagcagcaatctttgggtgttcggcggagggaccaagctgaccgtcctag

SEQ ID NO: 2541 - DNA, 337 bp, Artificial Sequence
  Description of Artificial Sequence: Synthetic polynucleotide
cagtctgtgctgactcagccaccctccgcgtccgggtctcctggacagtcagtcaccatctcctgcactggaaccagcagtgacgttggtgcttataactttgtctcctggtaccaacaccacccaggcaaagcccccaaactcataatttatgacttcaataagcggccctcaggggtccctgatcgcttctctggctccaagtctggcaacacggcctccctgaccgtctctgggctccaggctgacgatgaggctgattattactgcagctcatatgcaggcagcaacaatttcgatgtggtattcggcggagggaccaagctgaccgtcctag

SEQ ID NO: 2542 - DNA, 334 bp, Artificial Sequence
  Description of Artificial Sequence: Synthetic polynucleotide
aattttatgctgactcagccccactctgtgtcggagtctccggggaagacggtaaccatctcctgcacccgcagcagtggcaccattgccagcaactatgtgcagtggtaccagcagcgcccgggcagtgcccccaccactgtgatctatgaggataaccaaagaccctctggggtccctgatcggttctctggctccatcgacaggtcctccaactctgcctccctcaccatctctggactgacccctgacgacgaggctgactactactgtcagtcttatgataccagcaatcattatgtcttcggaactgggaccaaggtcaccgtcctag

SEQ ID NO: 2543 - DNA, 337 bp, Artificial Sequence
  Description of Artificial Sequence: Synthetic polynucleotide
cagtctgtgctgactcagccaccctcagtgtctgggagcccagggcagagggtcaccatgtcctgcactgggagcagttccaacatcggggcaggatatgatgtacactggtaccagcaggtcccaggagcagcccccagactcctcatctatggtaccaataatcggccctcaggggtccctgaccgattctctggctccaagtctggcacctcagcctccctgaccatcactgggctccaggctgaggatgaggctgattattactgccagtcctatgacaacagtctgactgatccgtatgtctttggaactgggaccaaggtcaccgtcctaa

SEQ ID NO: 2544 - DNA, 334 bp, Artificial Sequence
  Description of Artificial Sequence: Synthetic polynucleotide
cagtctgccctgactcagcctgcctccgtgtctgggtctcctggacagtcgatcaccatctcctgcactggaaccagcagtgacgttggtggttctaagtatgtctcctggtatcaacaacacccaggcaaagcccccaaagtcatgatttatgatgtcactaagcggccctcaggggtccctgatcgcttctctggctccaagtctggcaacacggcctccctgacaatctctgggctccaggctgaggatgaggctgattattactgtgcagcatgggatgacagcctgaatggtgtggtattcggcggagggaccaagctgaccgtcctgg

SEQ ID NO: 2545 - DNA, 331 bp, Artificial Sequence
  Description of Artificial Sequence: Synthetic polynucleotide
aattttatgctgactcagccccactccatgtcggggtctgcggggaagacagtgaccgtctcctgcatccgcagcagtggcagcattgccaacaactttgtgcagtggtatcagcagcgcccgggcagtgcccccaccactgtgatctatgaggataaccaaagaccctctggggtccctgatcggttctctggctccatcgacagctcctccaactctgcctccctcaccatctctggactgaagactgaggacgaggctgactactactgtcagtcttatgatagcagcaatctggtgttcggcggagggaccaggctgaccgtcctag

SEQ ID NO: 2546 - DNA, 331 bp, Artificial Sequence
  Description of Artificial Sequence: Synthetic polynucleotide
cagcctgggctgactcagccacccgcagcatctgggacccccgggcagagggtcaccgtctcttgttcaggggccagcgccaacatcggaagtaatgctgtaagctggttcaagcagttcccagaaacggcccccagactgctcatctctggtaacactcaccggccctcaggggtccctgaccgagtgtctggctccaagtctggcacctcagcctccctgaccatcagtgggctccagtctgacgatgaggctgattattactgtgcagcatgggatgacagtttaaatggttatgtcttcgggagtgggaccaaggtcaccgtcctaa

SEQ ID NO: 2547 - DNA, 334 bp, Artificial Sequence
  Description of Artificial Sequence: Synthetic polynucleotide
aattttatgctgactcagccccactctgtgtcggagtctccggggaagacggtaaccatctcctgcaccggcagcagtggcagcattgccagcaactatgtgcagtggtaccagcagcgcccgggcagtgcccccaccactgtgatctatgaggataaccaaagaccctctggggtccctgatcggttctctggctccatcgacagctcctccaactctgcctccctcctcatctctggactgaagactgaggacgaggctgactactactgtcagtcttatgatagcagcaatcattgggtgttcggcggagggaccaagctgaccgtcctag

SEQ ID NO: 2548 - DNA, 331 bp, Artificial Sequence; identical to SEQ ID NO: 2280
  Description of Artificial Sequence: Synthetic polynucleotide

SEQ ID NO: 2549 - DNA, 334 bp, Artificial Sequence; identical to SEQ ID NO: 2537
  Description of Artificial Sequence: Synthetic polynucleotide

SEQ ID NO: 2550 - DNA, 337 bp, Artificial Sequence
  Description of Artificial Sequence: Synthetic polynucleotide
cagtctgccctgactcagcctccctccgcgtccgggtctcctggacagtccgtcaccatctcctgcactggaaccagcagagacattggtgcttatggttatgtctcctggtaccagcaggtcccaggcaaagcccccaaactcattatttatgaggtccgtaatcggccctcaggggtttctagtcgcttctctggctccaagtctggcaacacggcctccctgaccatctctgggctccaggctgaggacgaggctgattattactgcagctcatatacaagcagcagcactctcgatgtggtattcggcggagggaccaagctgaccgtcctag

SEQ ID NO: 2551 - DNA, 331 bp, Artificial Sequence
  Description of Artificial Sequence: Synthetic polynucleotide
cagcctgtgctgactcagccaccctcagcgtctgggacccccgggcagagggtcagcatctcttgttctggaagcagctccaatatcggacgtaatgctgtagactggtaccatcaggtcccaggaacggccccccaactcctcatctacagtaataatgagcggtcctcaggggtccctgaccgattctctgcatccaggtcaggaaatacagcctccctgaccattattggactccagcctgaggacgaggctgactactactgctcagcatgggacaccagcctcagtacttgggtgttcggcggagggaccaagctgaccgtcctag

SEQ ID NO: 2552 - DNA, 334 bp, Artificial Sequence; identical to SEQ ID NO: 2269
  Description of Artificial Sequence: Synthetic polynucleotide

SEQ ID NO: 2553 - DNA, 325 bp, Artificial Sequence; identical to SEQ ID NO: 2279
  Description of Artificial Sequence: Synthetic polynucleotide

SEQ ID NO: 2554 - DNA, 331 bp, Artificial Sequence; identical to SEQ ID NO: 2265
  Description of Artificial Sequence: Synthetic polynucleotide

SEQ ID NO: 2555 - DNA, 334 bp, Artificial Sequence; identical to SEQ ID NO: 2282
  Description of Artificial Sequence: Synthetic polynucleotide

SEQ ID NO: 2556 - protein, 8 aa, Artificial Sequence
  Description of Artificial Sequence: Synthetic peptide
GFTFSSYA

SEQ ID NO: 2557 - protein, 8 aa, Artificial Sequence
  Description of Artificial Sequence: Synthetic peptide
GYTFTTSG

SEQ ID NO: 2558 - protein, 8 aa, Artificial Sequence
  Description of Artificial Sequence: Synthetic peptide
GGSIRTHS

SEQ ID NO: 2559 - protein, 8 aa, Artificial Sequence
  Description of Artificial Sequence: Synthetic peptide
GFTFSSHA

SEQ ID NO: 2560 - protein, 8 aa, Artificial Sequence
  Description of Artificial Sequence: Synthetic peptide
GFTFTTYG

SEQ ID NO: 2561 - protein, 8 aa, Artificial Sequence
  Description of Artificial Sequence: Synthetic peptide
GFTFSDYP

SEQ ID NO: 2562 - protein, 8 aa, Artificial Sequence
  Description of Artificial Sequence: Synthetic peptide
GFTFDDYA

SEQ ID NO: 2563 - protein, 8 aa, Artificial Sequence
  Description of Artificial Sequence: Synthetic peptide
GGTFSSYA

SEQ ID NO: 2564 - protein, 8 aa, Artificial Sequence
  Description of Artificial Sequence: Synthetic peptide
GGSIRTHS

SEQ ID NO: 2565 - protein, 8 aa, Artificial Sequence
  Description of Artificial Sequence: Synthetic peptide
GFTFSHYD

SEQ ID NO: 2566 - protein, 10 aa, Artificial Sequence
  Description of Artificial Sequence: Synthetic peptide
GFSLSTTGVG

SEQ ID NO: 2567 - protein, 8 aa, Artificial Sequence
  Description of Artificial Sequence: Synthetic peptide
GGSISSYY

SEQ ID NO: 2568 - protein, 10 aa, Artificial Sequence
  Description of Artificial Sequence: Synthetic peptide
GFSLSTSGVG

SEQ ID NO: 2569 - protein, 10 aa, Artificial Sequence
  Description of Artificial Sequence: Synthetic peptide
GDSVSSNSAA

SEQ ID NO: 2570 - protein, 8 aa, Artificial Sequence
  Description of Artificial Sequence: Synthetic peptide
GFTFGDYA

SEQ ID NO: 2571 - protein, 8 aa, Artificial Sequence
  Description of Artificial Sequence: Synthetic peptide
GFTFSNYG

SEQ ID NO: 2572 - protein, 8 aa, Artificial Sequence
  Description of Artificial Sequence: Synthetic peptide
GFTFDDYA

SEQ ID NO: 2573 - protein, 8 aa, Artificial Sequence
  Description of Artificial Sequence: Synthetic peptide
GFSFSRYG

SEQ ID NO: 2574 - protein, 8 aa, Artificial Sequence
  Description of Artificial Sequence: Synthetic peptide
GYSFTSYW

SEQ ID NO: 2575 - protein, 8 aa, Artificial Sequence
  Description of Artificial Sequence: Synthetic peptide
GYRLSDYY

SEQ ID NO: 2576 - protein, 8 aa, Artificial Sequence
  Description of Artificial Sequence: Synthetic peptide
GFTFDDYA

SEQ ID NO: 2577 - protein, 8 aa, Artificial Sequence
  Description of Artificial Sequence: Synthetic peptide
GFTFSHYD

SEQ ID NO: 2578 - protein, 8 aa, Artificial Sequence
  Description of Artificial Sequence: Synthetic peptide
GGTFSTYG

SEQ ID NO: 2579 - protein, 8 aa, Artificial Sequence
  Description of Artificial Sequence: Synthetic peptide
GGTFSSSG

SEQ ID NO: 2580 - protein, 8 aa, Artificial Sequence
  Description of Artificial Sequence: Synthetic peptide
GFTFSSYW

SEQ ID NO: 2581 - protein, 8 aa, Artificial Sequence
  Description of Artificial Sequence: Synthetic peptide
GFTFDDYA

SEQ ID NO: 2582 - protein, 8 aa, Artificial Sequence
  Description of Artificial Sequence: Synthetic peptide
GYSFTGSH

SEQ ID NO: 2583 - protein, 8 aa, Artificial Sequence
  Description of Artificial Sequence: Synthetic peptide
GASISNSF

SEQ ID NO: 2584 - protein, 8 aa, Artificial Sequence
  Description of Artificial Sequence: Synthetic peptide
ISYGGSNK

SEQ ID NO: 2585 - protein, 8 aa, Artificial Sequence
  Description of Artificial Sequence: Synthetic peptide
ISAYNGNT

SEQ ID NO: 2586 - protein, 7 aa, Artificial Sequence
  Description of Artificial Sequence: Synthetic peptide
IHHSGAT

SEQ ID NO: 2587 - protein, 8 aa, Artificial Sequence
  Description of Artificial Sequence: Synthetic peptide
ISYDGSYT

SEQ ID NO: 2588 - protein, 8 aa, Artificial Sequence
  Description of Artificial Sequence: Synthetic peptide
ISYDGSIK

SEQ ID NO: 2589 - protein, 8 aa, Artificial Sequence
  Description of Artificial Sequence: Synthetic peptide
TSYDGRIK

SEQ ID NO: 2590 - protein, 8 aa, Artificial Sequence
  Description of Artificial Sequence: Synthetic peptide
IDWNSGVI

SEQ ID NO: 2591 - protein, 8 aa, Artificial Sequence
  Description of Artificial Sequence: Synthetic peptide
INPNSGGT

SEQ ID NO: 2592 - protein, 7 aa, Artificial Sequence
  Description of Artificial Sequence: Synthetic peptide
IHHSGAT

SEQ ID NO: 2593 - protein, 8 aa, Artificial Sequence
  Description of Artificial Sequence: Synthetic peptide
IGYDGTNL

SEQ ID NO: 2594 - protein, 7 aa, Artificial Sequence
  Description of Artificial Sequence: Synthetic peptide
IYWNDDK

SEQ ID NO: 2595 - protein, 7 aa, Artificial Sequence
  Description of Artificial Sequence: Synthetic peptide
IYTSGST

SEQ ID NO: 2596 - protein, 7 aa, Artificial Sequence
  Description of Artificial Sequence: Synthetic peptide
IYWDDDK

SEQ ID NO: 2597 - protein, 9 aa, Artificial Sequence
  Description of Artificial Sequence: Synthetic peptide
TYYRSRWYN

SEQ ID NO: 2598 - protein, 10 aa, Artificial Sequence
  Description of Artificial Sequence: Synthetic peptide
IRSKAYGGTT

SEQ ID NO: 2599 - protein, 8 aa, Artificial Sequence
  Description of Artificial Sequence: Synthetic peptide
IWERGSKK

SEQ ID NO: 2600 - protein, 8 aa, Artificial Sequence
  Description of Artificial Sequence: Synthetic peptide
IDWNSGVI

SEQ ID NO: 2601 - protein, 8 aa, Artificial Sequence
  Description of Artificial Sequence: Synthetic peptide
IRHDGSKK

SEQ ID NO: 2602 - protein, 8 aa, Artificial Sequence
  Description of Artificial Sequence: Synthetic peptide
IYPGDSDT

SEQ ID NO: 2603 - protein, 8 aa, Artificial Sequence
  Description of Artificial Sequence: Synthetic peptide
IKQDGSEK

SEQ ID NO: 2604 - protein, 8 aa, Artificial Sequence
  Description of Artificial Sequence: Synthetic peptide
ISWNSGSI

SEQ ID NO: 2605 - protein, 8 aa, Artificial Sequence
  Description of Artificial Sequence: Synthetic peptide
IGYDGTNL

SEQ ID NO: 2606 - protein, 8 aa, Artificial Sequence
  Description of Artificial Sequence: Synthetic peptide
IIPSLGIP

SEQ ID NO: 2607 - protein, 8 aa, Artificial Sequence
  Description of Artificial Sequence: Synthetic peptide
IIPMLGTP

SEQ ID NO: 2608 - protein, 8 aa, Artificial Sequence
  Description of Artificial Sequence: Synthetic peptide
IKQDGSEK

SEQ ID NO: 2609 - protein, 8 aa, Artificial Sequence
  Description of Artificial Sequence: Synthetic peptide
IDWNSGVI

SEQ ID NO: 2610 - protein, 8 aa, Artificial Sequence
  Description of Artificial Sequence: Synthetic peptide
INPDSGVI

SEQ ID NO: 2611 - protein, 7 aa, Artificial Sequence
  Description of Artificial Sequence: Synthetic peptide
TSYSGNS

SEQ ID NO: 2612 - protein, 16 aa, Artificial Sequence
  Description of Artificial Sequence: Synthetic peptide
AKVRGSGWYWGSAFDI

SEQ ID NO: 2613 - protein, 12 aa, Artificial Sequence
  Description of Artificial Sequence: Synthetic peptide
ARDFHLYYGMDV

SEQ ID NO: 2614 - protein, 9 aa, Artificial Sequence
  Description of Artificial Sequence: Synthetic peptide
ARGPGILSY

SEQ ID NO: 2615 - protein, 11 aa, Artificial Sequence
  Description of Artificial Sequence: Synthetic peptide
ARDWVNFGMDV

SEQ ID NO: 2616 - protein, 14 aa, Artificial Sequence
  Description of Artificial Sequence: Synthetic peptide
ARVGDSSSYYGIDA

SEQ ID NO: 2617 - protein, 14 aa, Artificial Sequence
  Description of Artificial Sequence: Synthetic peptide
ARDPGWLRSVGMDV

SEQ ID NO: 2618 - protein, 15 aa, Artificial Sequence
  Description of Artificial Sequence: Synthetic peptide
AKDAYSYGFLGAFDI

SEQ ID NO: 2619 - protein, 10 aa, Artificial Sequence
  Description of Artificial Sequence: Synthetic peptide
ARGSGGYYLG

SEQ ID NO: 2620 - protein, 9 aa, Artificial Sequence
  Description of Artificial Sequence: Synthetic peptide
ARGPGILSY

SEQ ID NO: 2621 - protein, 20 aa, Artificial Sequence
  Description of Artificial Sequence: Synthetic peptide
ARAANYYDSSGYGRADAFDI

SEQ ID NO: 2622 - protein, 14 aa, Artificial Sequence
  Description of Artificial Sequence: Synthetic peptide
ARISGSGYFYPFDI

SEQ ID NO: 2623 - protein, 11 aa, Artificial Sequence
  Description of Artificial Sequence: Synthetic peptide
ARDVGFGWFDR

SEQ ID NO: 2624 - protein, 14 aa, Artificial Sequence
  Description of Artificial Sequence: Synthetic peptide
ARISGSGYFYPFDI

SEQ ID NO: 2625 - protein, 9 aa, Artificial Sequence
  Description of Artificial Sequence: Synthetic peptide
AREIRGFDY

SEQ ID NO: 2626 - protein, 9 aa, Artificial Sequence
  Description of Artificial Sequence: Synthetic peptide
TTADDDMDV

SEQ ID NO: 2627 - protein, 15 aa, Artificial Sequence
  Description of Artificial Sequence: Synthetic peptide
AREGISMTGAEYFQH

SEQ ID NO: 2628 - protein, 17 aa, Artificial Sequence
  Description of Artificial Sequence: Synthetic peptide
AKDIGPGGSGSYYAFDI

SEQ ID NO: 2629 - protein, 12 aa, Artificial Sequence
  Description of Artificial Sequence: Synthetic peptide
AKDGRLEAALDD

SEQ ID NO: 2630 - protein, 11 aa, Artificial Sequence
  Description of Artificial Sequence: Synthetic peptide
ARRGDLDAFDI

SEQ ID NO: 2631 - protein, 13 aa, Artificial Sequence
  Description of Artificial Sequence: Synthetic peptide
ARVRGWSRGYFDY

SEQ ID NO: 2632 - protein, 10 aa, Artificial Sequence
  Description of Artificial Sequence: Synthetic peptide
ARDWWGSIDH

SEQ ID NO: 2633 - protein, 20 aa, Artificial Sequence
  Description of Artificial Sequence: Synthetic peptide
ARAANYYDSSGYGRADAFDI

SEQ ID NO: 2634 - protein, 12 aa, Artificial Sequence
  Description of Artificial Sequence: Synthetic peptide
ARENIDLATNDF

SEQ ID NO: 2635 - protein, 9 aa, Artificial Sequence
  Description of Artificial Sequence: Synthetic peptide
ARDGGNYDY

SEQ ID NO: 2636 - protein, 12 aa, Artificial Sequence
  Description of Artificial Sequence: Synthetic peptide
ARGFYYYGAFDI

SEQ ID NO: 2637 - protein, 15 aa, Artificial Sequence
  Description of Artificial Sequence: Synthetic peptide
AKDAYSYGFLGAFDI

SEQ ID NO: 2638 - protein, 14 aa, Artificial Sequence
  Description of Artificial Sequence: Synthetic peptide
ARDKAIGYVWALDY

SEQ ID NO: 2639 - protein, 12 aa, Artificial Sequence
  Description of Artificial Sequence: Synthetic peptide
ARREWIKGHFDY

SEQ ID NO: 2640 - protein, 123 aa, Artificial Sequence; identical to SEQ ID NO: 21
  Description of Artificial Sequence: Synthetic polypeptide

SEQ ID NO: 2641 - protein, 119 aa, Artificial Sequence; identical to SEQ ID NO: 33
  Description of Artificial Sequence: Synthetic polypeptide

SEQ ID NO: 2642 - protein, 115 aa, Artificial Sequence; identical to SEQ ID NO: 5
  Description of Artificial Sequence: Synthetic polypeptide

SEQ ID NO: 2643 - protein, 118 aa, Artificial Sequence; identical to SEQ ID NO: 17
  Description of Artificial Sequence: Synthetic polypeptide

SEQ ID NO: 2644 - protein, 121 aa, Artificial Sequence; identical to SEQ ID NO: 15
  Description of Artificial Sequence: Synthetic polypeptide

SEQ ID NO: 2645 - protein, 121 aa, Artificial Sequence; identical to SEQ ID NO: 27
  Description of Artificial Sequence: Synthetic polypeptide

SEQ ID NO: 2646 - protein, 122 aa, Artificial Sequence; identical to SEQ ID NO: 41
  Description of Artificial Sequence: Synthetic polypeptide

SEQ ID NO: 2647 - protein, 117 aa, Artificial Sequence; identical to SEQ ID NO: 35
  Description of Artificial Sequence: Synthetic polypeptide

SEQ ID NO: 2648 - protein, 115 aa, Artificial Sequence; identical to SEQ ID NO: 1
  Description of Artificial Sequence: Synthetic polypeptide

SEQ ID NO: 2649 - protein, 127 aa, Artificial Sequence; identical to SEQ ID NO: 9
  Description of Artificial Sequence: Synthetic polypeptide

SEQ ID NO: 2650 - protein, 122 aa, Artificial Sequence; identical to SEQ ID NO: 13
  Description of Artificial Sequence: Synthetic polypeptide

SEQ ID NO: 2651 - protein, 117 aa, Artificial Sequence; identical to SEQ ID NO: 3
  Description of Artificial Sequence: Synthetic polypeptide

SEQ ID NO: 2652 - protein, 122 aa, Artificial Sequence; identical to SEQ ID NO: 722
  Description of Artificial Sequence: Synthetic polypeptide

SEQ ID NO: 2653 - protein, 119 aa, Artificial Sequence; identical to SEQ ID NO: 724
  Description of Artificial Sequence: Synthetic polypeptide

SEQ ID NO: 2654 - protein, 118 aa, Artificial Sequence; identical to SEQ ID NO: 726
  Description of Artificial Sequence: Synthetic polypeptide

SEQ ID NO: 2655 - protein, 122 aa, Artificial Sequence; identical to SEQ ID NO: 728
  Description of Artificial Sequence: Synthetic polypeptide

SEQ ID NO: 2656 - protein, 124 aa, Artificial Sequence; identical to SEQ ID NO: 730
  Description of Artificial Sequence: Synthetic polypeptide

SEQ ID NO: 2657 - protein, 119 aa, Artificial Sequence; identical to SEQ ID NO: 732
  Description of Artificial Sequence: Synthetic polypeptide

SEQ ID NO: 2658 - protein, 118 aa, Artificial Sequence; identical to SEQ ID NO: 734
  Description of Artificial Sequence: Synthetic polypeptide

SEQ ID NO: 2659 - protein, 120 aa, Artificial Sequence; identical to SEQ ID NO: 736
  Description of Artificial Sequence: Synthetic polypeptide

SEQ ID NO: 2660 - protein, 117 aa, Artificial Sequence; identical to SEQ ID NO: 69
  Description of Artificial Sequence: Synthetic polypeptide

SEQ ID NO: 2661 - protein, 127 aa, Artificial Sequence; identical to SEQ ID NO: 9
  Description of Artificial Sequence: Synthetic polypeptide

SEQ ID NO: 2662 - protein, 119 aa, Artificial Sequence; identical to SEQ ID NO: 742
  Description of Artificial Sequence: Synthetic polypeptide

SEQ ID NO: 2663 - protein, 116 aa, Artificial Sequence; identical to SEQ ID NO: 744
  Description of Artificial Sequence: Synthetic polypeptide

SEQ ID NO: 2664 - protein, 119 aa, Artificial Sequence; identical to SEQ ID NO: 39
  Description of Artificial Sequence: Synthetic polypeptide

SEQ ID NO: 2665 - protein, 122 aa, Artificial Sequence; identical to SEQ ID NO: 41
  Description of Artificial Sequence: Synthetic polypeptide

SEQ ID NO: 2666 - protein, 121 aa, Artificial Sequence; identical to SEQ ID NO: 23
  Description of Artificial Sequence: Synthetic polypeptide

SEQ ID NO: 2667 - protein, 118 aa, Artificial Sequence; identical to SEQ ID NO: 73
  Description of Artificial Sequence: Synthetic polypeptide

SEQ ID NO: 2668 - protein, 6 aa, Artificial Sequence
  Description of Artificial Sequence: Synthetic peptide
SLRAYF

SEQ ID NO: 2669 - protein, 9 aa, Artificial Sequence
  Description of Artificial Sequence: Synthetic peptide
SSDVGAYNY

SEQ ID NO: 2670 - protein, 8 aa, Artificial Sequence
  Description of Artificial Sequence: Synthetic peptide
SSNIGSND

SEQ ID NO: 2671 - protein, 9 aa, Artificial Sequence
  Description of Artificial Sequence: Synthetic peptide
SSDVGGYNY

SEQ ID NO: 2672 - protein, 8 aa, Artificial Sequence
  Description of Artificial Sequence: Synthetic peptide
SSNIGSNS

SEQ ID NO: 2673 - protein, 8 aa, Artificial Sequence
  Description of Artificial Sequence: Synthetic peptide
SGSIARNY

SEQ ID NO: 2674 - protein, 6 aa, Artificial Sequence
  Description of Artificial Sequence: Synthetic peptide
NIGSKS

SEQ ID NO: 2675 - protein, 8 aa, Artificial Sequence
  Description of Artificial Sequence: Synthetic peptide
SNNVGNQG

SEQ ID NO: 2676 - protein, 8 aa, Artificial Sequence
  Description of Artificial Sequence: Synthetic peptide
SSNIGSNT

SEQ ID NO: 2677 - protein, 8 aa, Artificial Sequence
  Description of Artificial Sequence: Synthetic peptide
TGSIAGNY

SEQ ID NO: 2678 - protein, 8 aa, Artificial Sequence
  Description of Artificial Sequence: Synthetic peptide
SGSIASNY

SEQ ID NO: 2679 - protein, 8 aa, Artificial Sequence
  Description of Artificial Sequence: Synthetic peptide
SGSIASNY

SEQ ID NO: 2680 - protein, 8 aa, Artificial Sequence
  Description of Artificial Sequence: Synthetic peptide
SGSIASNY

SEQ ID NO: 2681 - protein, 9 aa, Artificial Sequence
  Description of Artificial Sequence: Synthetic peptide
SSDVGAYNF

SEQ ID NO: 2682 - protein, 8 aa, Artificial Sequence
  Description of Artificial Sequence: Synthetic peptide
SGTIASNY

SEQ ID NO: 2683 - protein, 9 aa, Artificial Sequence
  Description of Artificial Sequence: Synthetic peptide
SSNIGAGYD

SEQ ID NO: 2684 - protein, 9 aa, Artificial Sequence
  Description of Artificial Sequence: Synthetic peptide
SSDVGGSKY

SEQ ID NO: 2685 - protein, 8 aa, Artificial Sequence
  Description of Artificial Sequence: Synthetic peptide
SGSIANNF

SEQ ID NO: 2686 - protein, 8 aa, Artificial Sequence
  Description of Artificial Sequence: Synthetic peptide
SANIGSNA

SEQ ID NO: 2687 - protein, 8 aa, Artificial Sequence
  Description of Artificial Sequence: Synthetic peptide
SGSIASNY

SEQ ID NO: 2688 - protein, 9 aa, Artificial Sequence
  Description of Artificial Sequence: Synthetic peptide
SSDVGGYDY

SEQ ID NO: 2689 - protein, 8 aa, Artificial Sequence
  Description of Artificial Sequence: Synthetic peptide
TGSIAGNY

SEQ ID NO: 2690 - protein, 9 aa, Artificial Sequence
  Description of Artificial Sequence: Synthetic peptide
SRDIGAYGY

SEQ ID NO: 2691 - protein, 8 aa, Artificial Sequence
  Description of Artificial Sequence: Synthetic peptide
SSNIGRNA

SEQ ID NO: 2692 - protein, 8 aa, Artificial Sequence
  Description of Artificial Sequence: Synthetic peptide
SGSIASNY

SEQ ID NO: 2693 - protein, 6 aa, Artificial Sequence
  Description of Artificial Sequence: Synthetic peptide
NIRTKG

SEQ ID NO: 2694 - protein, 9 aa, Artificial Sequence
  Description of Artificial Sequence: Synthetic peptide
SSDVGTYNR

SEQ ID NO: 2695 - protein, 8 aa, Artificial Sequence
  Description of Artificial Sequence: Synthetic peptide
GGSIASNY

SEQ ID NO: 2696 - protein, 3 aa, Artificial Sequence
  Description of Artificial Sequence: Synthetic peptide
GQD

SEQ ID NO: 2697 - protein, 3 aa, Artificial Sequence
  Description of Artificial Sequence: Synthetic peptide
DVT

SEQ ID NO: 2698 - protein, 3 aa, Artificial Sequence
  Description of Artificial Sequence: Synthetic peptide
SNN

SEQ ID NO: 2699 - protein, 3 aa, Artificial Sequence
  Description of Artificial Sequence: Synthetic peptide
EVS

SEQ ID NO: 2700 - protein, 3 aa, Artificial Sequence
  Description of Artificial Sequence: Synthetic peptide
SNN

SEQ ID NO: 2701 - protein, 3 aa, Artificial Sequence
  Description of Artificial Sequence: Synthetic peptide
ADR

SEQ ID NO: 2702 - protein, 3 aa, Artificial Sequence
  Description of Artificial Sequence: Synthetic peptide
EDR

SEQ ID NO: 2703 - protein, 3 aa, Artificial Sequence
  Description of Artificial Sequence: Synthetic peptide
MNN

SEQ ID NO: 2704 - protein, 3 aa, Artificial Sequence
  Description of Artificial Sequence: Synthetic peptide
SNN

SEQ ID NO: 2705 - protein, 3 aa, Artificial Sequence
  Description of Artificial Sequence: Synthetic peptide
DDN

SEQ ID NO: 2706 - protein, 3 aa, Artificial Sequence
  Description of Artificial Sequence: Synthetic peptide
EDN

SEQ ID NO: 2707 - protein, 3 aa, Artificial Sequence
  Description of Artificial Sequence: Synthetic peptide
EDN

SEQ ID NO: 2708 - protein, 3 aa, Artificial Sequence
  Description of Artificial Sequence: Synthetic peptide
EDN

SEQ ID NO: 2709 - protein, 3 aa, Artificial Sequence
  Description of Artificial Sequence: Synthetic peptide
DFN

SEQ ID NO: 2710 - protein, 3 aa, Artificial Sequence
  Description of Artificial Sequence: Synthetic peptide
EDN

SEQ ID NO: 2711 - protein, 3 aa, Artificial Sequence
  Description of Artificial Sequence: Synthetic peptide
GTN

SEQ ID NO: 2712 - protein, 3 aa, Artificial Sequence
  Description of Artificial Sequence: Synthetic peptide
DVT

SEQ ID NO: 2713 - protein, 3 aa, Artificial Sequence
  Description of Artificial Sequence: Synthetic peptide
EDN

SEQ ID NO: 2714 - protein, 3 aa, Artificial Sequence
  Description of Artificial Sequence: Synthetic peptide
GNT

SEQ ID NO: 2715 - protein, 3 aa, Artificial Sequence
  Description of Artificial Sequence: Synthetic peptide
EDN

SEQ ID NO: 2716 - protein, 3 aa, Artificial Sequence
  Description of Artificial Sequence: Synthetic peptide
DVS

SEQ ID NO: 2717 - protein, 3 aa, Artificial Sequence
  Description of Artificial Sequence: Synthetic peptide
DDN

SEQ ID NO: 2718 - protein, 3 aa, Artificial Sequence
  Description of Artificial Sequence: Synthetic peptide
EVR

SEQ ID NO: 2719 - protein, 3 aa, Artificial Sequence
  Description of Artificial Sequence: Synthetic peptide
SNN

SEQ ID NO: 2720 - protein, 3 aa, Artificial Sequence
  Description of Artificial Sequence: Synthetic peptide
EDN

SEQ ID NO: 2721 - protein, 3 aa, Artificial Sequence
  Description of Artificial Sequence: Synthetic peptide
YAS

SEQ ID NO: 2722 - protein, 3 aa, Artificial Sequence
  Description of Artificial Sequence: Synthetic peptide
EVS

SEQ ID NO: 2723 - protein, 3 aa, Artificial Sequence
  Description of Artificial Sequence: Synthetic peptide
EDN

SEQ ID NO: 2724 - protein, 11 aa, Artificial Sequence
  Description of Artificial Sequence: Synthetic peptide
NSRDSGENHLI

SEQ ID NO: 2725 - protein, 12 aa, Artificial Sequence
  Description of Artificial Sequence: Synthetic peptide
AVWDDGLNGRVV

SEQ ID NO: 2726 - protein, 11 aa, Artificial Sequence
  Description of Artificial Sequence: Synthetic peptide
ATWDDSLSAGV

SEQ ID NO: 2727 - protein, 11 aa, Artificial Sequence
  Description of Artificial Sequence: Synthetic peptide
AAWDDSLSGPV

SEQ ID NO: 2728 - protein, 11 aa, Artificial Sequence
  Description of Artificial Sequence: Synthetic peptide
AAWDDSLTGYV

SEQ ID NO: 2729 - protein, 11 aa, Artificial Sequence
  Description of Artificial Sequence: Synthetic peptide
QSYDSSNQAAV

SEQ ID NO: 2730 - protein, 11 aa, Artificial Sequence
  Description of Artificial Sequence: Synthetic peptide
QVWDGDSDHYV

SEQ ID NO: 2731 - protein, 11 aa, Artificial Sequence
  Description of Artificial Sequence: Synthetic peptide
SAWDSSLSRWV

SEQ ID NO: 2732 - protein, 12 aa, Artificial Sequence
  Description of Artificial Sequence: Synthetic peptide
AAWDDSLNVHYV

SEQ ID NO: 2733 - protein, 10 aa, Artificial Sequence
  Description of Artificial Sequence: Synthetic peptide
QSYDSGNRGV

SEQ ID NO: 2734 - protein, 10 aa, Artificial Sequence
  Description of Artificial Sequence: Synthetic peptide
QSYDSSSLWV

SEQ ID NO: 2735 - protein, 10 aa, Artificial Sequence
  Description of Artificial Sequence: Synthetic peptide
QSFDSASLWV

SEQ ID NO: 2736 - protein, 10 aa, Artificial Sequence
  Description of Artificial Sequence: Synthetic peptide
QSYDSSNLWV

SEQ ID NO: 2737 - protein, 12 aa, Artificial Sequence
  Description of Artificial Sequence: Synthetic peptide
SSYAGSNNFDVV

SEQ ID NO: 2738 - protein, 10 aa, Artificial Sequence
  Description of Artificial Sequence: Synthetic peptide
QSYDTSNHYV

SEQ ID NO: 2739 - protein, 12 aa, Artificial Sequence
  Description of Artificial Sequence: Synthetic peptide
QSYDNSLTDPYV

SEQ ID NO: 2740 - protein, 11 aa, Artificial Sequence
  Description of Artificial Sequence: Synthetic peptide
AAWDDSLNGVV

SEQ ID NO: 2741 - protein, 9 aa, Artificial Sequence
  Description of Artificial Sequence: Synthetic peptide
QSYDSSNLV

SEQ ID NO: 2742 - protein, 11 aa, Artificial Sequence
  Description of Artificial Sequence: Synthetic peptide
AAWDDSLNGYV

SEQ ID NO: 2743 - protein, 10 aa, Artificial Sequence
  Description of Artificial Sequence: Synthetic peptide
QSYDSSNHWV

SEQ ID NO: 2744 - protein, 10 aa, Artificial Sequence
  Description of Artificial Sequence: Synthetic peptide
SSYTSSSPVV

SEQ ID NO: 2745 - protein, 10 aa, Artificial Sequence
  Description of Artificial Sequence: Synthetic peptide
QSYDSGNRGV

SEQ ID NO: 2746 - protein, 12 aa, Artificial Sequence
  Description of Artificial Sequence: Synthetic peptide
SSYTSSSTLDVV

SEQ ID NO: 2747 - protein, 11 aa, Artificial Sequence
  Description of Artificial Sequence: Synthetic peptide
SAWDTSLSTWV

SEQ ID NO: 2748 - protein, 10 aa, Artificial Sequence
  Description of Artificial Sequence: Synthetic peptide
QSYDSSNHWV

SEQ ID NO: 2749 - protein, 11 aa, Artificial Sequence
  Description of Artificial Sequence: Synthetic peptide
QVWDSSSDLVV

SEQ ID NO: 2750 - protein, 10 aa, Artificial Sequence
  Description of Artificial Sequence: Synthetic peptide
SSYTRTFTYV

SEQ ID NO: 2751 - protein, 10 aa, Artificial Sequence
  Description of Artificial Sequence: Synthetic peptide
QSYDSSNPVV

SEQ ID NO: 2752 - protein, 108 aa, Artificial Sequence; identical to SEQ ID NO: 22
  Description of Artificial Sequence: Synthetic polypeptide

SEQ ID NO: 2753 - protein, 112 aa, Artificial Sequence; identical to SEQ ID NO: 34
  Description of Artificial Sequence: Synthetic polypeptide

SEQ ID NO: 2754 - protein, 110 aa, Artificial Sequence; identical to SEQ ID NO: 6
  Description of Artificial Sequence: Synthetic polypeptide

SEQ ID NO: 2755 - protein, 111 aa, Artificial Sequence; identical to SEQ ID NO: 18
  Description of Artificial Sequence: Synthetic polypeptide

SEQ ID NO: 2756 - protein, 110 aa, Artificial Sequence; identical to SEQ ID NO: 16
  Description of Artificial Sequence: Synthetic polypeptide

SEQ ID NO: 2757 - protein, 112 aa, Artificial Sequence; identical to SEQ ID NO: 28
  Description of Artificial Sequence: Synthetic polypeptide

SEQ ID NO: 2758 - protein, 108 aa, Artificial Sequence; identical to SEQ ID NO: 42
  Description of Artificial Sequence: Synthetic polypeptide

SEQ ID NO: 2759 - protein, 110 aa, Artificial Sequence; identical to SEQ ID NO: 36
  Description of Artificial Sequence: Synthetic polypeptide

SEQ ID NO: 2760 - protein, 111 aa, Artificial Sequence; identical to SEQ ID NO: 2
  Description of Artificial Sequence: Synthetic polypeptide

SEQ ID NO: 2761 - protein, 111 aa, Artificial Sequence; identical to SEQ ID NO: 10
  Description of Artificial Sequence: Synthetic polypeptide

SEQ ID NO: 2762 - protein, 111 aa, Artificial Sequence; identical to SEQ ID NO: 14
  Description of Artificial Sequence: Synthetic polypeptide

SEQ ID NO: 2763 - protein, 111 aa, Artificial Sequence; identical to SEQ ID NO: 4
  Description of Artificial Sequence: Synthetic polypeptide

SEQ ID NO: 2764 - protein, 111 aa, Artificial Sequence; identical to SEQ ID NO: 723
  Description of Artificial Sequence: Synthetic polypeptide

SEQ ID NO: 2765 - protein, 112 aa, Artificial Sequence; identical to SEQ ID NO: 725
  Description of Artificial Sequence: Synthetic polypeptide

SEQ ID NO: 2766 - protein, 111 aa, Artificial Sequence; identical to SEQ ID NO: 727
  Description of Artificial Sequence: Synthetic polypeptide

SEQ ID NO: 2767 - protein, 112 aa, Artificial Sequence; identical to SEQ ID NO: 729
  Description of Artificial Sequence: Synthetic polypeptide

SEQ ID NO: 2768 - protein, 111 aa, Artificial Sequence; identical to SEQ ID NO: 731
  Description of Artificial Sequence: Synthetic polypeptide

SEQ ID NO: 2769 - protein, 110 aa, Artificial Sequence; identical to SEQ ID NO: 733
  Description of Artificial Sequence: Synthetic polypeptide

SEQ ID NO: 2770 - protein, 110 aa, Artificial Sequence; identical to SEQ ID NO: 735
  Description of Artificial Sequence: Synthetic polypeptide

SEQ ID NO: 2771 - protein, 111 aa, Artificial Sequence; identical to SEQ ID NO: 737
  Description of Artificial Sequence: Synthetic polypeptide

SEQ ID NO: 2772 - protein, 110 aa, Artificial Sequence; identical to SEQ ID NO: 70
  Description of Artificial Sequence: Synthetic polypeptide

SEQ ID NO: 2773 - protein, 111 aa, Artificial Sequence; identical to SEQ ID NO: 10
  Description of Artificial Sequence: Synthetic polypeptide

SEQ ID NO: 2774 - protein, 112 aa, Artificial Sequence; identical to SEQ ID NO: 743
  Description of Artificial Sequence: Synthetic polypeptide

SEQ ID NO: 2775 - protein, 110 aa, Artificial Sequence; identical to SEQ ID NO: 745
  Description of Artificial Sequence: Synthetic polypeptide

SEQ ID NO: 2776 - protein, 111 aa, Artificial Sequence; identical to SEQ ID NO: 40
  Description of Artificial Sequence: Synthetic polypeptide

SEQ ID NO: 2777 - protein, 108 aa, Artificial Sequence; identical to SEQ ID NO: 68
  Description of Artificial Sequence: Synthetic polypeptide

SEQ ID NO: 2778 - protein, 110 aa, Artificial Sequence; identical to SEQ ID NO: 24
  Description of Artificial Sequence: Synthetic polypeptide

SEQ ID NO: 2779 - protein, 111 aa, Artificial Sequence; identical to SEQ ID NO: 74
  Description of Artificial Sequence: Synthetic polypeptide

SEQ ID NO: 2780 - protein, 10 aa, Artificial Sequence
  Description of Artificial Sequence: Synthetic peptide
AARGGSSFDI

SEQ ID NO: 2781 - protein, 9 aa, Artificial Sequence
  Description of Artificial Sequence: Synthetic peptide
QAWDSNSYV

SEQ ID NO: 2782 - protein, 3 aa, Artificial Sequence
  Description of Artificial Sequence: Synthetic peptide
DDS

SEQ ID NO: 2783 - protein, 3 aa, Artificial Sequence
  Description of Artificial Sequence: Synthetic peptide
QDS

SEQ ID NO: 2784 - protein, 18 aa, Artificial Sequence
  Description of Artificial Sequence: Synthetic peptide
ARAANYYDSSGYGRADAF

SEQ ID NO: 2785 - protein, 117 aa, Artificial Sequence
  Description of Artificial Sequence: Synthetic polypeptide
QVQLVQSGGGVVRPGRSLRLSCAASGFTFSSYAMHWVRQAPGKGLEWVAVISYDGSNKYYADSVKGRFTISRDNAKNSLYLQMNSLRAEDTAVYYCASGSYAQFDYWGQGTLVTVSS
